United States Patent Application Publication US 2008/0274467 A1 - sequence listing, part 15

SEQ ID NO: 1719 - DNA, 1501670 bp, Homo sapiens
  misc_feature (1)...(1501670): n = A,T,C or G
ctgggaattgcagtccccgctctgctctgtccggtcacaggactttttgccctctgttcccgggtccctcaggcggccacccagtgggcacactcccaggcggcgctccggccccgcgctccctccctctgcctttcattcccagctgtcaacatcctggaaggtaggggcggggaggcaagcccaagtggaatactgtttctggggcgcgggtctgggtttccacgcgcgtcaggtcatcaccccggagcccagtggggccggcgccgctcacggggcggtgggcttctgtcccgagtactcttccgccccacgagggtctcagggtggggactcgggccccccaattcccaagcaccgaccctagccctaacccgttcctcctccaccgtgtttatacattggggaaactgaggcacggggccacgccagcgggtccggggacgccacagctcttggctctgggggtgtagtcggcacccgccgttttgggatggttcgtcagtttcatagacaagtagcgaaaatccgtcccaacaggtctgtgttaaacacgcagctctggattcccctaaggggttgctgaacacgtgcccaggacaggagcaaaccggagtatagagaaggcagcattttgggagataattttacattactacttcaaaaacaggcaaagaggcatcgaatttattgttgtgggagaactcatcggtacttggtcggactttcttacacttattttatggttgttgtttttatttttagcgtcaaaggggggaattttaaaggtatatccaagttggtggtggtggggggtaaggaggcaggttagtggaacttgagatgcatctgcagatttctctgtaggctcacattctgccctcgctgtgttaccttggaacagccactcacagcgcttatctgggaaacaaggagctcaatgctcccaggtcaagtggccaaaggatgttgcctgaagccgaaatctaaattgaggttatgcttgtgaaagtttaccacttgcagatttactgctattattattctggtctctcagaaatgtgctgggaccaatagaaaatactcacagtggttgttttagtaaggttctgacctgggccgggcccagactaccaagggtggtccctactcgcacctgatgttaagccggatctacctgaactctccctccttggcttcagcctgcggcctgaggccttggccgcggaggcttctgggagttgcagtcccgcctcttgtttctcgtcgggcaggtactccacctcgtggcgtgccattttgcacggcgagatgtctcctgggagacgaagtctcgcttctagccgttctgtagagcagccgcttgactcggaactacaactcccatgtggacctgcgttcatggctgccggcctgtgtccacctgctgcaacctggactagaaatatttagtaaagaaagaagtctagggttgtgtgtgtgtgtgtgtgtgtgtgtgtgtgtgtgtgtgtgtgtgttgttattgattgcatatgctgttctaagtgttagatatgggattgttgtatacggtgttccaagtattaacgtacatgcttccaaaaccactaacacttgaccatttagaacctgttcacatgatctctttttaatactacatttcccatttgtatatgagaaaaaacttgagaagatagcccatgattacacagctagcaatataatatatattcaataaaatatatgtgttataatttaatcctcttaaaagctatatgagagtgagaaccatttttatatcaactttacagattagaaaactaaggctaggaaagttaagtaacttgttcaagttaaaacactggtgaataaaaggactgagactgtaagcccttctgcttaacagtctctgcttagagaaagaccttaccttacagagctgaggaggagtccaacctttctggctacagaatttggaatcttttaattataccatgctgcctctgtacttagatactaaacatttgagctgcaaaaacctttgagatcatttaattctaatgcaaagatcttggaacacttcttggcctataataaagattccatatatatatgtatatagttttagaatacctttattttagagattaggaaactggcccaggtggtaaagcagtttgcccaaggtcacacagttggtttgtgtcagagattagactagaaccaagcatcttattttcaagtccagggttattttcattccaccagcagtcagctagcaggaacaccagatgtgtagctctttagataatggtttctcctctaatttgctctttcaaggccacagaccaggaccaattgttataaattatcttatttattattggtaaggttgtaatacttcatgaattcaacaaatgttttttgagcttctttatatggtcatctctcttaaggtgcaaggaccacatagatgataaggacttaatgcattcagactggaaggaccttataaataatctaatctaactcttattttataaatgaggagagtgtgttacgaagtagtctgcaatcttcatctcatgccctcatgtcaaaagtatcccgtttctgcaagaaggcaggtttctggagtcctcacagtagtgtggataacctttttaggcttatgcttttctatttggtatccttgtcttggcctttttcctgcagcctttgatagaatgctttaggaaatgtttttgtgtccccatctttatttgtgtgtttatgcaacttcaacatgctctgtttctattttggaagttagtctggttttggctcccattactcttttctcttttgttctttcagacacttgagaacaaattctgacactatgtttgcattcacatgttaaaatctgaccctctaatatgaactctcagaaatctatcaagttgtgactttcattttggaagacatattggccctttcaattatgtattcacagataataaggcaggtaactctggtctcttctgaaagatgatttccatatagttaggtaataaagtaacagttttatgaattattggctaaacattcctgaaacagtctatttgagaagttctcctcatcacccccatgcccccacccccacgctctcccaactgatagtctgatcattcagcttccaccacagtgcctgaccaccagtagacactgaaaaagtacttgtggcattgcattcataagcaccctgttcccacatctcttcattgaatctgtttactcttttaatgcagaagtgcagctttgaaatataagatgtaggaggttactttgctttcaacatgtacattgcagagaaaaatctcagcctttgagatcattctccaaggggttgtctctttgggaatgtccatatctgtgacttctcagatgagaaagtgatctatatagtaagacatagcagagaagcagtagaggggttgtctggggacccatgatttaattcccagctgtgccttttagacaggttacttagcccttggttttctctcttaaaatagggataataagcatttctacctcacagtgatgatgaagaagaaagtgtgtttaaagctttgagcatgttgtcaggctcttaacagcttgcagtcaatagataaatataatagctcttatttttgttattgtaagcctgatatatgaaaattcacatttcctcaagatttaaaactttaagcaggtatttatattataaaaggatttgtttgccacttgttttcttagagtagcacacttggtcatcacatttaaaatatgaagttcctcacaactcttgataacctgtcttgtcagcacagtgacactctcttgtgtgggcagagagacagtgaagcttttggctcggtactgcctgctgagaggcccctgatctatggttccacctatatattaaatccttgatttaaaagcagcctgtttctgtcagtggggccttctgtccatctctagaaaggattggtcctatcccaggaggctcagggttagagtgaggcagttgtcatccagctggtgagtaatcctggggcaatgaccgtggggatgtggcagtgcttctttctaaagctgacaacttcaatagccatgaggttacgataaggaggtgagttactgaaaagaagtgatgcagggaacagggaaggagcaacaggaatgaggatcacagcaacagcagaggagaaggacaaaggaaacagcggaggccctcagtatcctaaacatatttttattcagcacatttatcttgctcctagctctgttccaggcactgcatctgctctggtgagagcagtaaatggggctggtagggaggcactgatggggtgagtgagggtatattctcggcagggaagaacctagtacaatggaggacaggagggagggagggaggggatgttgggatttgatgagcagaaagaaggtctgtgtgcttagggtatgaaaatcaatggctggaggaggtggagagaataaggctgcagaggtgagcctgagtaatagatatgtttttctttttttaaatttttttaaaattttactttaagttctgggatacatgtacagaatgtacaggtttgttaataggtatacatgtgccgtggtggtttgctgcacctgtcaatctgtcatctaggttttaagccctgcatgcattaggtatttgtcctaatgctctccctccccttccccctctaccccacaacaggccccggtgtgtgatgttcccctccctgtgtccatgcgttctcattgttcaactcccacttatgagtgagaacgtgtggtgtttgcttttctgttcctgtgttagtttgctgagaatggtgagcctgagtaatactatgcagagtccggttacctgcatttcgaccttattccgagggcatttgggaaattgtttaatggccttaaatggggaaatgaaattgttggatttgttttcataaaagtatggatgtatagctatgtattgtattattgaagattacttagagtgtagactttaagtgttcttgttcccagaaaggggtcttgatccagaccccaagagagggttcttgggtcttatgcaagaaagaattcagggcaagtccacagagtaaagtgaaagcaagtttattaagaaagtaaaggaataaaaggatggctactccatagacggagcagtcctgagggtggctggtttctcatttttatggttatttcttgatgatatgctaaacaaggcatggattattcgtgactcctctttttagaccatatagggtaactttctgacattgccatggcatttttaaactgtcatggcgctggagggagtatagcagtgaggacgaccagaggtcactcttgtggccattttggttttggggggttttagccaacttctctactgcaacctgttttatcagcaaggtctttattacccatatcttgtgccaaccttctatcttatcttgtgactaagaatgccttaacctcctgggaatgcagcctagtagatctcagccttattttactcagcccctattgaagatggagttgctctggttcaaacacctctgacattctcaccacaaataaatacgtatttgaggtagtgcatattaattagcttgatgtagccattccacatgggatacatatttcaaaacatcatgttgtataccataaacatatacaatttttatttgtcaagtaaatcaggttttaaaaagtatggatgcattatggataatgaatttatctgaggtaatagttgatgtgggataagcatgtatgtttgtgcttctttaattttaatgtgcatacaagtctcctgctgatcttaaaatgcagattctgattaaattaaagacctggaaaggatcagagagtcagtatttctaacagactgatgctgctggtccatggatcgtcctttgagtagcaagtacttaggatactcttcagtggtctaggtgacagatgatgtagttaagagaatggactcgatagagcaaaagacctggactttaatcttggttctgctactttctatgtgtgtgactctggggaaagtgtccaaatctctctgagcctcaatttcctgatttgtgaaatgggggcgataatttctattgcagagggatgtttttagttttcagtgaggtaacccattgaaatgcttaacacagtaactggtactccataaatggtagctaatgattttattcttatcattgtcaataaaaaacacaagttgatgcatcctgctctgtttccttgtttatcatattttgaatactaagaggacttagataacctttaattctactgtttttgcttacctctatgatatgatgtttggaatttcttcaatcctctgtaaaagttggcgtattatggggtcggggaggagaagtatcttttcctcaccctcaggttcttggttgactcccctgtaacaaaagacagattaacgagagaaaagcacacagatttatttaacgtaagttttatgtgacacaggattcttcataatggaatgaagacccccaaaactggtaaacctgtgtattttttatgctagatttgatgaagaagtacatagttgtgtagaagtatgattgaataagaaaacatgagctaacaatgggaggaaacatagcaagacctgtttgttcagattctctgtaaccctttgttttcagagataaggatgttctttcattccaggtatgggaagtgagaaacctttcacaggagggtcttagacctgcttcaggagaaggccagataattcttcctaggttttatgacctgcttcagagagggcagaaggaaggtcagagagtgacctctgaccttctggcttctgctgtcttctcaaattcattcagcttacaatatttcagggtagtatgtcctgaaccccatcatgggcaaatagatatatttcatcccatgcaattgagtctttctaaatttgatggacaaaatctgggatccttaaattaacacattatatctgattattaggatgggaattcgaggtacctggcctcctaatgtaagtttattccttcattatgtaattttaatttgtttggattgctttccaactagtggctctcaggcttggctgtaagttagaatcacctggggctggtcccatccagataaccgaaagagtggggaggggagcaggtgttttttttgtttgtgtgatttcttttgtttgtttattttttacatttcccagctgattctaaagtgcatctaagattgaaaaccactgattctaataacacagcattgtggaatgattcgcagctgattctaaagtgcatttaacattgaaaaccactgattctaataacacagcatcgtggaatgaatcaggtataatccaataggtaaaaggtctgagtggggaatgaaatatctagaaagtagcattttgaaggctttgggaatgaaagaaaagcgtcatcacaaagctgtcatggaatttgatgaactaactataaattttgcactagttatctttgagattaactaccagggacactctttctcccctaccctccttgtatctcttgctgtgcttgtctaagggttttccttatattgaatttcaggttgtgtttctcgtcctgtacttagtttgcctcattcctcatagctgggggtggagtggggggctataatcccattaaaactgtgttccaaagaaactcagtgacatgctttcatgatctatggcagtgttattgaaagggtttaaacagttgttcagataaaataccactcatttttactggtaatattcttacattctaattgagtagcttgaaatgaaccattgaaatgaaccacttctagaaaggctgcctattataaagttttcttcctacccccatcctctgtcaaagcagaagaataattaagctaatttgattacatacctttaattttcttgataatccatatatgtggtgattgtgagggaggaaaaaagaaaaacaatcctttctctactttcttaggttctgctcctggggcactgaaaagtaaactgacaaaagacagattaagaggagaaatcatttattacatatgcatacagaggccttcatagaaaagaagtgaagaccctaaagaggtggttaggtctgggggcttatatattatgtggagaagaaactagacaaagtgaaacctcctttgcaaaaattatgacggtgaaagagatctgacctaaccgcatctaacttgcctctaacctccaagctgtcctcgttcattcctgtgcgtaggccagactaactttgggaggatcttagtttatagtgtaactttggaacaaagatgataacaaccctttcccaaaccccctaggactaacaaattagccacaagtttagaaattatggtttaggagtcatgcaactagaggccacaagattctaaacctccccagttgctcctagggataacatcaaaacctaaggttggtgctggagatatttttccaaccttgcactagatggatcagatagcaccacccaggttgataaactggctcatttggtcttgtgcctccatgcaggaactgactcagcacaggaggacagctttgactccctgtgatttcatctccaattcgaccgatcagcactccccactgcctggcccgctacccaccaaattatccttaaaaaatcccagtctctgaaatgttccagggagactgatctcagtaataataaaactctggtctcctgttcagccggctctgcatgaattaaattctttctctgttgcaattcctctctctggataaaccatctgggcagcaggcaaaatgaacctgttgggtggttacaaaaggacaaggggatttgggcttctggggtagggggataaactgtgaaaaaatgactaggaaaatgtatggtaaatgaaggttgtttagtaaggtttgtttatgcaggtaagaagtctctctggtagggaaaggggaaaacctttatttatagaaaatatgtcacctttacaaaggaaaatctatgccctgcttttagctagatggaggagggcagaggtgtttttttttttgttgttgttttttctgaatctgctgttcttaattgccttcaactcaaataacccttatgccaaagtggcatattttggggtagcatattctgatcccctttcagaccctttcctttggaaagttgtttttctgactcatagaaaatgcatacagttatatttgagtatttatatttatatttaaacccttatatcaacggtccaggaacattcttggtttgaatatatattacccagcaccgtaatttcatttttcagcatttcctgaacctttctgcccaccaggaggttatttcacaatgtagtggccttacttttctggtctgttcactccatacagagaaaaagagaaagggtgggaaaaagagtgtttttgccagagtgttaactgcagttaaaaatcacttattttaggggtattttgtttgtatgccagtgttttcttttaatgatgaataagtgggaatagaagagaaaattgagaaactgcttgagaagttcacaaaagatacacattttcaggattctgtaacttaaagactcttgctgagtctttttaagtgtttattagtgttctttgttatggatttacctctttttcttaacaatcagaatcctattaaaattcagtatattttgcagtttctcagactcacagctactggagttagaaaccatcatagataatgttgaagtatcagtactccctcacaaggtttaatgcatgaatattttagttagaccaggctggaggagcatacaatctatagtcatttaatcactgaagtctgtggaatgtggtaagaacaagatttttattttctgagaagtcttcttcccacatcttagttttgaaaaaacaaagcaaaacacaaaactcactgctgcctttggactccacattaactgaaggacggtacctgcttggttttgtcagtagatgtttaagctgtgcccagaagcacgagtttacctatgcgtttggagccctgaggacaggtggagggaagggttggaacctgcttagagtaagattgtttcagtcctggagcactagcgattccagttcaatctcttctaggaatgatcctggcaagaaatccaagggagagcaggagaggcaagagggaggtaaaacaaatgcagagagtgtgggagaggtagaacaacaaaaaatggtggggtggagagagaggggaatattttgttttacagccacttgtgtaagtaaaattagtctctgcctgtcagttactacatcatcagaaagtggcaggtctgattttcactggatgtagtctaccactttgttggcctgcctggaagcatagactatgtagcacaccatatgccactttgggacgccttacatagatgagtagtcagagtctagcgcagctgaaattgaggtaccaaggcctgtgccaccaacctttcccaatttaattgatctggacgagacatgctctagtgattctaacttgtagccagggccaagaaccactggttagaaagcaatcccaatgggttaaaattatgtaaagaagggggcactgtaattggctacataaatttccattagaaggcaaggtaccttaaattcccatcttaataatcagatataacatgttaccttaaagatcccagattttttccatcaagtttagagagactcaattgtatgggctgaaatatatctatttgcccataatacctcaaaatttacagcagattgaaggagttctagcttgggccatatgcctaccacttggaattgtttctatagccagttggaggggtactgtgagtggccaggtgtggagcaaatgcccaccctgggagaggagagattcacccagaggaagtgggccagggctgccacattcttagcatcagaggccaccattcataccagagtatatgtgactggtgcctgctggagttgtgctgtgcaaagcttgcagggctgtacacacagaaaggccctggttaacgagagctgctgataccttcagaagagggatgtgacactagggatacagcaaaacaggtagccactgtagtttgaaatcccatttgctgggttctgccagcctggtggataaaaacaaggccaagaagcttcagaaaaatctacagctgaggccctctcttggctcctctgagcagggataaagcttcctctaaactaaggcttcctctagcctcttgaacttccacaaggcaacaggccaaggtttccctggcctagaggtgttagctgtgtttggcttcctgttgcagatggaacagctgggtccaactcctgtgggttgaggactgctggaactatatgcaagggccctggtgaggccagaagtgtttgcatttccaacaagctgccaggtgatatatatgttgctggtccatgggctacacttgaaataaaaagatttcagatttttgtggcttctactaagttgccattctgttttaatgtaatgagtagtattgtttagaatttatatatatatatatatatatatatatatatatatatatatatggccagttgtttttctttgcagttttatttctctttgtaaaatggacataatagtacccacttcgtagattgttatgaattaaatgggatgatctatataaaatatcagcactgccctcatggagtctagtgaaggggacagataacacataggcaaacacctgtaataataatatgtcaagtacaagaaggaagattataagatactgtgatagaaagagggatgagtaacctattgagataaaatggccagacagaaagagctgagaattaagcagagacctaagtaaaggatgagagggagctggccatatgaagagctggtattaatagaatggggtcccaggcagaaggaatagcctataccaaggccttaaggtgggaaagagcttaacaccatcaaagggagaaaagaaggcccctgtggctgaaccatagagagggaaagggagactgacatcagatgaaattggctgtatagatagggcccaggccatacagggccttgaagtcaaagtatggaatttggatttttttcccatgggtaatgctcctgtccctggatctcagtattgtggttggatccatgctgtttgctgtctagacctctcttccactcatctgcttctccactacttctagactttttttttcccctccctttggccagaacatgagttacagtcctggctgatgcttccctaatgcctactatctccacaggctaatttgttacctgttaatacactctctggaccctaggttccatttgtataacccaattccttctcatttccttcactaggttctgatcagagcatctgcgatacccacttctgccccctaatgcggtatcacatccatatccctcctgatttgacttctctgccaaatggcagtgaaaatcaagaacaaagccctagcagtagtgaggcagatgaatacaatgaaagggactgacagtttgggatcttttaattggtggaaagaagaggagatacataatttttatatgttagaatcatggcttcaagagatttttaaaaagagcttgaaagaagctggttggattcatctagtctactctcctttatttgcatatttgaaaaactggctgtaaagaggaaaaatgacttggtgtgggtcacagacagtgcaattggcagaatgttgacctttcttagtctcctataggttagctcctgtgtcttttgcttccttcttatactttttacagcttttatttaacctttgattttaaatcaatgcttctcttccctttggactgtaagctctatgaagggcagcggtagtggctattttgctgatggctgtctcccctgcacctggtccttatgcagggtgagtgatttatgtcaggtccctaactgagaattcagtgttagattttgcactgtaccacactacttctgggccatcttctgttactgattgtaagtcatttctctggttagctgagtcttggctgcatggggagtatatgcaagtgaaatctacagaaactgcagacttcatccccttttactatttctctgaatttgcatagcctcccgtttcctccccataatggtgataatgctttgtttattgtgttaatattatctatcttccctctctagaaagatagcactatgagggcagggacaattgttggtgctgtttattgctgtctccatgcatagaacaatgcatggcctatgataaacaaaatgaggtgtgactcatcatagccatcaagatctgaaagtctgggttgtctgaagactgttgctctgtgcagatgggttatttatactttgtagagaataagatttttcaaatactggggagtcacagagggacccttgagagaggaattataaataagagcccattatctgaccctgaggactcacttctggctttgcctctcatttgctgtgtcatcttgagtgaagtgctcaacctctctgagcttcgctttcctgtaaaatggagatgataatactacctagctcttagagctgttgtaagaatcaagtgaaatcattgatttcaattatgttctacacagtgcctgatacatactcagcactcaatacgtatgacctgagatcagtgtcattaaacctggaatgttactctattcctggctagcagttatacatgcattccagtttttactttataaatcataactaaacctttcccatagtactatgttatttggtgaagtttcatattcactttgaccatcaaataaatgtagaaatcatcagttctggctatttaaagtttactgaaaatgttgatgaacaacaacccaggattcagcacaaaaaaataaatcctggttgatgttaaagacaggaatataaatcagaaaacaaacatatctgcagtactgtaatatttaaatggcttctcataaacacttaagattctcattagtccaacatcagaaaaatgataaatattaatatctgtcatcaaaggaaagcttagaaatcaaagcagagtaaacaactgttgtatttcaaggattacataatactgaaagcatttttaattaaacaccccaaaactctatttttaaaaaactttctgtacgagttggtttatttttatccagtatacaaactaagatggatgtacatttaatcagaaaaaatgcaggtaatttgttgagtcagatcatgttctcaaagatttaggttgtgttgtatgtctacaaaagagacccacatgtgtctgaggcaaccctccatctccattgatctttaattctatttcagggggattccattggaaatgggccctaggtagatcatgtaagggcatgggtgcttcctgtcttcattgtgggttctctcctgaagagcctcttctcaagtcatgttgctgctactctgagtgggccaggaagcatatgcagcagtcccagggtcagcagggagcagagagagggaggacagtctgctgtcatcactctgaagctgtcagctttcccttcctgctttcacagtgcctgagatagctgactcaacatgagatggctacatcatgtcaactgggagacccaggttttagttctggctctcccactgccttatgcaagtctcttttctctgggcctccctttccacatctgtaaagtgagggcttggatctgatcattctgaagtcctattcctctccaacattctgtgacctgggtagagcacttcagggacctaatgagctgttttccctgccctctgtagaagagtaattctggagtggctggctttggaaccagtcagagctatagctcatcttaagtaactcatttaagttctcagtttcctcatccattaaataagaatagtaaaagattgttgtcaacacaagagatgtcactgggaaggcatctagagctgcatttggcaggtcacagggattgaataatgatgctgtgttattattattattactaattaccataatatatattatataacaataatatatatttatatttatatatctatattatattattataacatataatataatatactatatattataacaaaaatatattattatagtatatgttataatacatatagtaaatatagtatattgttacatactatatttatatcttgacttagcactttcctggctctttataccacagttttctcatctaaaaatggggatagtaagagaacttacctcattggttagttgtgaggattaaatgagataatacatgaaaacacacagggcactttctggtacatattaagcactaatgacatgttagtgattattttagctatgattttattattggtcacaataccttgcttttagtgaaagtactggacaggacaaggtgaatggggtagttacattctctaatacacatgctgaagtcaatttccagtggtctaaaaaaacccaacattttccctaaacatctcatttatcatagggaacgctaagtaaatgatactgagtctgcatttaaaagtcaagtatctgtatccaacatgggttcttttttttttgagacagagtctcgctctgtcatccaggctggagtgcagtggcgcaatcttggctcactgcaacctccgcctcctgggttcaagcgattctcctgtctcagcctcccaagtagctgggactacaggcatgcgccactgcacccagctaatttttccaacatgggttcttaaaccaggatgcttgggcctctttaggacctaaaatttcaggtccatgatctatctgcacataaaaattgaaagcaagttaaaagagaccttactttttttttttaaattagattactatggccaggcactgaactaagatctttatgtagattttcgtatttcatcctcttagcaactctatggagtcgatacttgtattatccttgttttacacacgagaaaactgaagctcagagaggttaaacaagggctcaaggacacccagttggcaagtggtgggcctaagatatggacccaggccatccggctagggagcttgagctctaatagctaatgtccttaggtggcaaaaaggtcagacctgcctgatagctaccttttctgtaaaatgaagtctaatggataaggacaaggatataaaaggaattgcttttatcaatgacatagcaaattaacattcatttttattgttttcaagatcattccatttcaagtgaggggatgaatttcaatacaaattagacttatttaaggaaacatcaatatttttctcaaattagcagtatcaaaaccttatggaattaaagaaaatgtactgcatttatacaatgcaaatttatttggaaataaaatttctttatcattttctgtagcttagcttacagctgttgccatgtctatttttaaaacacaaaaataaattgtttcttgttaactccattggatctgcaggcaggtattagacaaagttggtgtggatgaattgaacatcttggtcggagggcccagaatattctgtaagaaggtgctatttagaagaaattttcttaccaactgcacaagaaaataaatttggaagatttaaaaaaatatagaaatactcaaaaaataaaataacattgcatttcacccattcatgatagcactatcaatatttcagtgtgtggctttttttccattgtttttattgcatgcatatttgttctgttagttttctaacagaaaatggacacatttttctaaatttggataatactttacatacagttttgttttctgttttcactcgtcaatatattgtatgcattttcccatggcattaatgtctacagagtattccactgttagaacatgacattattttttaatctatcccacttggtcaacatataggttttcctcaccattttttctgatgtatttgcacgtgtgcataatcacattcatgattttttcttaggagacatttccaggagtgggaatgctgggccacgttgtaaagctgtaggagtagctgcctggtttttctttgcagcaagcagtgctcccctatggatctagaatcctcactaacagcttctcctgggctctacttcccaggagcttcagagaagagaatacagagccagaagctagtggggcaattaaccacatcagtcttcagtttctgctggttgatcaaagaaatttgctgggttgcctgtactggccttaatgtgtcatgtattatttaataggttactatgtcagcttcaaatgctttcagctgcaagtaacctgcttaaaaagaatagaggtttgtttcttccacataaaaagaagtctagaaatggttagctttggctttagttcagcagctcagagatgtcaaggagagtgtatcttgcagttcttggcctttccataatggccacagaattgctgcagctgaagcaagcatcatgtttgtattcagggagtcaggagggggtgagaggacagagagatgaatgagacacattcttgatcctgggagttgttagcctgattaaaaaagtggtgcttttttctcatattgcagaaataatatatgttcattatagaaaatatatttcacccataatcttgccactcaggtaatcactactctcatattggtgtctatccttctagtctagttataaatgcacagatgcacaaaaaatggaattgtccatttatatactgttttgtaactggccttttaaatcagcatttagctcagtgcctagtacctggtagatgctctaaagaaggtattgaaaaattaatgaatgatttaaaaaatatactatgaatacttttctgtgccactgagtattctacggtatatgttttacagtgtagtttttgacagttgcatgttactggattgtttagatggcccataatttccttcactggttctttattattttacatgtagattaaaaaaattttcttaactatgataaataattctgcagtgaatgtgtgtgtgtgtgtgtacacaaatctcttattattttcttagataacttcctttcaaaagtggaatttctgggtctagggatatgccagttttaaggacctggatgtataccaccgaattgccctctccaaatgtgtgactaacaccagcaatgagaattataatcttttagctctttatttttacaaaacaatataaaaaggtataaagtgaaattttgttcttgctcctcttctcataccctcatctttgtacccatctcccttaaggtagtagccacttttattagcacacaggcaaatatgtatgtacgttattttccttcctttcttatataaagatattgtacaatacacattgttctgtaccttgctttatttggtttgactgttatataatgttccattatgtgaatattctatttatttacctgctctcctgtccagtcttatttgaagcctgtgtcttttcagccaaactgggcccaagttaaccttaatattctggccctgcacctaggcctaataggagcaggcagctgtatcttaatttcctagtcctgtggtctggcctactacatattttgactggctcccagggcatactttgcagtatttgaaatattctgaatcttctaagaagggagagaatttcaaaggtatgtttctcctcttgaagacctccctggtcctcccctgtctttgattatgagagagttttatcttctagtttaggtagagagccaacccctcctcctccaaggggtggtgggcatatatgggaaattatgactcacataccttttaaagaatttcatctcacagagtgctgtgtccattgtatgtttatggaatacgttttttcttttttcttttgagacaaggtcttgctctgtccctcaggctgaagtgcagtggcaagatctcagctcactgcaacctccacctccctggttcaagcgattctcgtgcctcagcctcccaagaagctgggattacaggtgtacaccatggtgtctggatgatttttgtatttttttttgtagagacagggtttcgccatgttggccaggctggtctcgaactcctggcctcaagtgatccaccagccttggcttctcaaagtgctgggattacaggcatgagccaccatgcccggcccccattgtatgtttaacttttacatatggacagtcttgtattgccttatttgttaaaggcaaatgtcaactttactttttttttctcactccttttattggtgcagaagggcagagcctacctttaagagcccaccacagtcacaacccaagcacatattttcattattcagaatttatgccagttcaataatataggcatacaaaaaataagggcacattcctgcatcacagtttcattttccatatgtatggctcatgtagttccttatccctccctgtgttttctgcctcagcctttcttttttccatagcacttgttacaatttgaagttgtctctttatttattgcctttttctccagctaggtgttactctctgtgaagggaagaactgagttggccaccagactctagtacctagcatagtgcctggaatatagaagatcctcagtacatctttgccaaacaaatggttcatagtaactgtccatatgctatgtataaagcacagttgattatatttattgagtttgaatctgaccattgtttgaattaataaacaacattaagaacttttagagcccagtgagcattttttttttttttccgtaagagaccgagactcactcttttgcccaggctggaatgcagtggcatgatcatggctccaccttgaacttctggactcaagaggtcctttcacctcagcctcccgagtagctggaaccataggtgcccaccaccacacctagcaattttttttaaactttttgtagaaatggggtcttattatgttgtccaggctggtttcaaatgcctggactcaagggatcctcccaccttggccttccaaaatggggtttcaggcatgagccattgcacacaacccagtgagtattttttaactgaaatttttatttagatagttctagattcacatgcagttgtaagaactagtatagagagattcatgcctatgcgttacccaatttctcttcatgataacattttgtaaaactatagcatcatatttactagcgactcattttatttagatttttccattttactgttgtgaacatttagttctatatgattttaccagtgagtatttttaaattctaaaaggatgacttcttattcttgaacttgaacacgtcagtgatagaatccacagttctgaaatgtcctttaaaaaaatcacagaatattagtgtaggaatcaaatttaatagattgttctgtgatataccagttccaaaactttagaatttcagaggctgtaaacataatttttgaattaggaagtgagataggatgggagctgacataggattgctaacttttaattctgccaagcaaagacatttaaaaaattattattttttaaatttttctcattttgctaggtactggttaaaaacaatattatggtttggtcctggtttgtcaactggtccttagcaatccttactctagtctaattgcttcatttctgagaatcagaaaatttaagtgtgtgatgatattaggccattcttgcattgctataaagaaatacaggagactcagtaatttattaaaaaaatagagatttaattggctcacagatcttcaggctgtacaagcatggtgctggcatctgctccattttgggggaggcttcagggagcttttactcatggcagaagacaaaatgggagcaggcatgtcatatggcaaaagcaggagcaagaggatagtaaggggaggtgccatacacctttgcacaaccagatctcacaagaactcactcactattatgaggacagcaccaagaggatagtgctaaaccattcatgaaaaatccacccccatcatccaattacctctcactaggctccacctctgacactgggaattataattcaacatgagatttggggggacaaatacccaaactatctcattgatccaagtctttctcattgtgtcttggcattttcaagttggaaatactaagacatgatcagaatatgcttattttatagctaaagacaacaaggtacagcgaggggaagggactttttaaggtagcagccaaaccctgtgtatacctcacttcccttactgggttaacctgcctaaggatcttgacctgatgcaccaaggagaaatggttactgggttgatctagaaggaaggctagtggatgtttattccagcctcccaaacaatataaacatcccttttccagtatttctggaaaatgatttatctggtctctacatatatttaccagtagagagagccctactgcataaattagctgttattacacctgttgatatattgttctaaggtctacacaagcttcccagtaaatctgaatccattaataataacactattatgtactgaaaacttactttgttctaggccctgtgctgcacgtttgacatacctccttaatctctgacctgtgagatgagtatttctattgtctccagtttcctaatgagggcctggttctcagagggctagagttattagcaatgggtaacacagctagtaaggtactacagctagctaagtaattgggagttatattagttttctagagctattgtaaccaattgctacaaatttggtggcttaaaacaacagaaatttatttcctcacagtcctggaagccagaagtccaaaatcaaggtgttggcagggccatgctccctcaacaggctctaggggagaaaacttccttgcctcttctagcttctggtggccccaagcattctttggcttgcacccacataactgtttgcttcatttggccttctcttctatatcttcttcttttctgtctgtctgcatctgcctttcttttgtaagaacactgatcattatatttagagctcacccagacaatccagtatgatctcatctcaagattcttaattatatttgcaaagacttttttttctaataaagtaatatttgcaggctccagggatttgacacagacatattggaggggtggggaatggcattcaacccagtacaggtttttactctagtgctctgattccaaaatctgtgctctgctctactctacagtatcttgtgaagtgacatggagaaaatccattttcccttccgcatggtaagaaaagactggctttctctctcagtgctgtatctcctttgccttgcatggtaccttgtatagaggaagtgctcagtaaaacggaatggccttattgatgaatgacccatcgaatgtatgaaggtagttttgctgtctcccattgcttttctccaggctgaacatccccaggtttcttatgtgaagttcagaacctctcaccattctagttgtcctcttggagatattttccagtttggccaatattcctcctaaaatatgcctttcaggttgaactctagataagacctaagtaacagatgtaggggaagcaaaatttcacccctaccttcttagggtttttggctgggcttaaaaattaaattgatacaaggcagattaatagaagaaaagcatacaaatttatttaatgtaagtttttttgtgacatgggagccctcataaggaaatgaagacccaaagatgaagttagaattgaacacttatatatggaattggataaagagtagtaaattgtgaagatgtgacaaggcaaagggccttgggccaggatatttaactgggtggagaggtgacgaggaaaataagagctagtttaataaggtttgtttgtacagagttctcttggtctcagtatcccgcccttgatgataagaatgttactttccttctggtgtcaggagaatattttccatacagggattttagctcttgcttttatgaagaaaaagaagagggtcagaaaacccttcttgcacctgctgtttttttttttaaattatttttttataagtgcctttagcttgaaaataattcttatgccaatgtggtatattttggggtggcatattctgccacctttcacccagtagaatgttaattctcatggtttttacactgtattgctttaaagtagctgtagattgtgtttactttagagcagctgctaaagtcattgctggtgattaataactacagacatttttttaaaaacctctcctcatattagtagctctacttagtcattgagtttttaggccaaattcaaccctcagttttgctagtaccatttttattgattttggattctgggaatggattttgagtttggaaagaaaataatccgaacatcacactcgggctttagtagaaagggcaaacatactcatgaatatatccggtttttcctctccattccaatttgttgatcccatggaaaaaagttctatgctgtaagagagatgaataatgatccaaaaacaattttctgcaagaacaaatcagaattttcatgaccaaatattagagaaaaagaacctttttcttctttatttccacccattgtggcatgtagttggtacagtctttttttttataagtcacatttaccaactgcttatattaattttcatgtacttataccctgaacaaatttatgctcttggtattgtatgtgctgcaagtttcactgctgtcaaaacatatttttaaaaataacccatggattttaaccagtacagtcaagataaattagattttttaaagtaaaatctaccttaatatttagatcagcaagaaaatgtgattatgattaacttttgcccttatgtggcaagataggacagaggtatactaatgtttaaaaattttttttaaaaattaattttctaaactagggattgaaataaggaaagacaataagtcccaatggtagacttgatggcgtcatttactccattatatcttctactgtgtcctgaggcctttgtcttaatggtttctttgaaaggaaacattctgaggagaaaagtcctccacttgtcactcttctctctcacctcttatctggctgctctaatacttctgaccttaacttaaatgtctcttcctcagagaaacctttactgacctgaaagacttggttagttcttatattgtaagctcttttagtaccttctacttcgttttttttcaggcttcattacattaatctcaattgcttgttaatctttgtcctttatcctagactgtaaactctaagagggcaggggctgtgtctgttttcagcattctacccatttcagtgtctggctcataccacatgcttactaaacatttcttgactaattggctggaggatgaaaaaagtcatgtaagggtatatgggaacagtaattttaacaattatttgcatttgcatttgtgtatgtatggacactaaactaatagtggtgaacttttttctctttctctctctctttccttttctctctctctgtctgtgttttgagtaccactgcatcaaattactgaagtagaaagaatggttgacattctgttttaaagtgaccatgtatttgacccacttcttctctagtaatgtcatcacgattgtatctcattgctgtgggttctcggaggctgacaggcggaacaagttgcttcagcacacagtcctcatctgtcatacagaacagcttgcagattcttattatgtgaatgaaatatggagagagggatatttttcttcctggactatcagggtaattgaaagtaaccatatcagggcatgaaggggaaatgcaggaaaatagactgcctttgtgaagggcaactcatctgctctcagaactgcaggtgtggagcctcatctccaaatgcaaaggcttgggaagtgtttcccgttatcaaaaggcctgagatttgactagcaccttctttcagtaaggaaaatgccttgcttctcattaccacccctcagcgcctgatgagatgccacgactgttatctttggaggcacatcccatgggactaggggcacagggctttttgtgttctttagacagggaagaaaactgttttagtattccagatcaataaactgtagtagaaaattggaaatgtgctatggaaaatcattaagcagagaaattctactgttcctgagttttgtatcagaagaaataaataacacttgactgctcttatagttaatattttataagcttggccctggtgaaatagaatatcagatcatactgtatcaatgacactttaccttaaatggtttggttctgtagatagacattgtatttatagaattgttttagttaacaggaagctttttatttaacactggtgaaaagtactaacatggtgatggaaaacaagctacaactcagcagtcattcaagtcatgacttcgttatattttgagatagctttaaaatcacttagtccaataaaactctaaagtactctaacttccacgttgctttatctaatttatgaaacaggcaaaggaatcaacaataaccctccatttaccattattagattagctattactgaaaccgcagaaagtatataacgcttaactttgtgttcacttgaattggttattaagctttgatggaactttcatttaacccaatgcctttgtttacaacaagaagcatgttaagtctattgtgttctgaatttggtatgaccattttagaacatgcctcctgcaaaggcatgttaaagttacagattctattcatttgtgttctgtcaaatattttcaatttaatccagttaaggtctcatttttcttcccaactttcaaaaaaatatatatatttttctctatgaggccgctactttttcaagaatataaccaggcattaacaaacatgaaactactcatagcaactccataaaaattgatttttcaaaattgaataagcatctggtggtctgaaaatgttttatacctgatatttaaaagatattttgactgttgccaaaaggaatcaattccttcatgctgtttcccttgcggatgctgtcatatgccactgtgttgtgtagagcacaggctctggaggaagggcagacttggatttgcacttaaactctgccgcttacatgcctgtgaccttgactttacctcttaaggaggtcagtgaactgtaactgccctttcctcagtgtgttacagagttcataatagtacttatctcatggtgttatataagagaagatgcatgtaaaaacctcaaacatgtggctattactataattaatgtatgtatatatatatgtgtgtgtgtgtgtccatccacactgtatgtatatatgtacatgctgccgatttgagtgacacattattgattctaaattaggttacactggtggaaatgctgtcatcctttcagtgcttaatgttctggtatcatggccatatctaaaagtaacatgagctggatgtggtggctcatgcctgtaatcccagcactatgggaggccaaggcgggtggatcagctgatgtcaggagtacaagaccagcctggccaacatggtgaaaccccgtctctattaaaaataaaaaaattagctgggtgtggtggcatgtgcccgtggtcccagctacttgggaggctgaggcaggagaattgcttgaacccgggaggcagagtgagccgagatcatatcgttgcattccagcctgggcgataagaatgagattccatgtcaataaaataaaataaaataaaataaaatagtaacataagcatggttaccattttgggtctagtcagagccacagcttgaaaacaaattaccatgtaggtagtcatttcagttgctgagattggaacccatgaaccaaatccctactccaaagaagtattacttttaaagtggaattttatttcagttcttttgaattgacataaaaactagaataaggaatgttgtagatatgtgaactagaactatacggcccttagggatcccagctacaatatattgtttttcactgaccttacttatttcccagatctattaagcttctatctgccttgctgtctttgcatttttcatctttatctctatccttgacatccacgtttttggggtagtagagatgggcttgggtaaatacatactatttcacccagtgtgctttggaccagtaacccatagaggagcaatgggaagtcttgctgggagatctgctctctgacattggtttccagcaaatttatatggttcttaagaggggcagaatttttccccttatctgtatcatattctgttggcttgaataatgagtcacagaagaatgaaaacttctttagctgtgaaagtttcagcaagaataagtgttagacccatcgtgttagtataatgcaaaataagatagcatttaaagatagtctctgcttcagcatcatattgacaatgcccctcactcgagtcagggattggggacttactgagatacaccatctggcaaaatgtggaaggccagttttgtgccaactgaaaaagctgcatcagttccaactcttgtgtactttgcacattattggatgccttgcaaaaatgtttatcactttttaattaggaagggctaagggacttcagtaccccaaagaaaatgtcagcaacccaaagatagaaaaattatccagtggattacaaggggcagtaagtatttaactttgagctcgcacatgaaatgaggacagtttcatactaggatctgtgctgggggacatgagggtggtatgtatttggtctgtctgggtggaactggggatctggtctttctgttattctgacagtttctcagattgtttcttctggagcatggtcagtccttgaaaacacatgccaagaggtcaactctgttctgctgcttggcctatcatgcaaactgtggtctgtcatgttcattaaaatgaaaatttgtcgaatggaatttgtccgactggcagaatagtttaaatgtcagatgttgttaggcctggatataaatattatgtttctattgttaattaattgcagcacctcagtaccagtgatccaaaatccaatttagtctgcaataggcctgtggataagggccagagataatgaatgcagaaggaaaaaatgtattcacaattttcattgtatctgtcaatgtcctcttagaaaaatagcaaattttggtatgtcactgtagttcaagaggtgcaaaacaggacagaattaagacccattgtcttttgaaacctctcaaatattacttactatcaaatctattccactgctagcgctaagtctgtcccagcatcaaaattcgtgacagatgctgccctgttccgttgccttgattccccccattgtttccacccttgagtctgttgttatgttcacagctcatttcagagttgccggactgaagtatctagtactgtaatcctcctcatttttctttgcagtattcatttcccactcctcgtcttgtcatcaacccttcctttctttttcttttcatcctttgttttggtccccaggctcagcagcctgtctatcaagtctgccactgtttgttaagatcattttgcttccaaattgagctggtggctgaatatcactcagaataacgctgctagaactgtctgcattagtaaagagagcagaaatcttgccgctggtgcccagacctcagagctgactgttgttgcaaagccatgagccagcaggcatttgtgaccgccattctctaccaatattttgttgaatacttgctgtgagcatggcaccttacccggccacctccctggtggtaggtgtgccaggcacaggaagactaattaagactttggaaggcaggactaatgtgttccagtggtcagggaccctcatttaattcctggcatcctggtccatgccaaccttgttctgcccctgtgattatgccagccatgaagcaggaaagggaagatgaactttggtctgctctgagtttccctgtccgcagtgtctgtcagattaaaaatgagagggaaggagactagagagtcttccagatggagagttcagaggagggcacaaccagactccctctccgcagtgacgttgctgggccatccgagcactgggccaggagccaggagcagaggctgctgcctgaccctgcagtggagtggggacctggcagaatggtcacccttggctcagggtaggagcagattcaaatcaggtgcacacaggccacgtggtggaggtggaatgtttacccccaaggctgggtcagtctggttggacgttggaccccactcttcttaagggtgctttccccaagtcacatgtgggtagagttggcaactgtagaaaccaaatggggagttggtattctccaacctctctgttttcttcctttagaatgaggcaggcatgcaggaaaggtgaccttagttaggctggaggcagcagtaacagtggtggccctgcatccttggactgacttgcatgttccagtcagcaggggtttggtaaggtactgacagtcactcttcatgcctcttggtagcacaactttataaccagtttcagcattcattgaaaagtatccagtgtagatgctccaggaacagagttttgcttaaatgtgaatgactttttaagtctaaggctatctgaggtctatgtaatgatggaaaggtaataaatgaagttaaacactgaatatctggttttgccttccttataaatggattgttttaatattgcatctgcaaaacatcagtttctccccaagatgaacctctttttctcaaattcaggctattagagtttgggagaggacctgtgctattgggaacagagctatttgacttaaaatgtcatcccgttctgagaaaacatactggggccatgttagggcatccctgtgcaaatgccacattgtcagaatgtctccccctggggttagactagccatggcaccttccagtcctgttggggtggcacaatttactgcttacccattgcctgggcaccaacccagccagggtcagggagccaagctccctgagatttcatggaatttgatttgtctgtgactctatgaattttcagatgctaattattggctgattggtattctgctcctcagatgtcacctaatgattttccagagcttctgctacttggtaaatttatttttctgatgcatggcaaatatgacagcattgaatagatgtggcaagggcatgtcgtgttgtgtgtatgtgtctcaggccatagaagggtaggcttcagtagagagataacttattgttttgtgaaagcatggggtacaaattaagagaatgaatgaaaaccaagaacaaaactcaaaactaacctttccttaataatttgcaatcaattttcattcctagtaatagtgaaaacttataatattcttttattaaagaaattttacggagtatatgtgccagacagtgttctagaagatgtagatttaatatagaacaagacagatgtggtccgtattattgctgaacttatggtcaaatagaaagactttcacctacattttaacaatattgattagctccccaggtaaataacaaaagtaagaattattctggtcacctccctggactctaaatgtatctgagtttcagaaattctgaaaatattctgtaagaaatgcatacatataaattgaaataaaacttctaggaatatatctgagaagtgttaggtttttggggcctttgctgctatgtcttatgagggtttaaattattatgcagattcttaaataattccatgtgtttaaagtattaatttattattatgtggtttaaccagggctgtgttttccaactgcctggttttcaccgatatgcaggaaaaggttttagaaaggggtttaagaatcttctcttagttgaaaattggctatcatttgaaagaatgctgcaataatttgtctgcagtaacagctcactgaacgtagcataaaaatgaaaacgagggctgaatttattcggtgtcttcattcttgtacctgaatgcacagactctttcctaggtatgtaaataattgttaaagacttaaaggtcaataaccaattccttaacgtggcagttaagtcaggtgagggctgcagaatgcaacaatagaggcaaatccctcagttccaggtaatgttgccttaagaatggtgcagttggatggtacccagagaaaggtttctactgggataagatgagtcaccatcaaagcaggtttctatatttcggaaagatatttgtttaaattcagacctatttttaagggagctggggtttggatccatggattgagaggcttgaggtttgtaaagattttttggagggctatcctctgaaaaatcagcaagataaatcagtgtgttactggcctgtactgctctacttccatgtttatttcttttaggagaactgaagcccaaagtatttggattcatttaaatttaatttatgtcttgcaggaggtcaaatgaaggatacagagtttgtctgctctagaacaaaatatggacgaattaggcatgaggaaagtgggaagtggtataatattgtaactgtaggtgaaaatgttttcatggcctgtagtttagatccttggatttttaggtcaaggaaaacatgggaaagagagggctaatttgagtggctattcctgactattgtctagatatctatactctggaacaagaacttttgggttctgacttgctcgcattttggatagccaggacacacacaaacacacacacacacacacacacacacacacacacacatttttagatttacacaaagatgtacacaaagatgatagaatctgcttgtattagtttattcaacaagtatggttgtgtgccacataatgtcatttcagtcaatgatggactgcaaataggaccatggttccataatattataatactatatttttaccataccttttatatgtttagatgtttagatacacaaatacttatcatcgtgttataattacttacagcatttaggacagtaacatgctttacaggtctgtaacctaggagcaataggctataccatataggataagtgtatagtgggctacactttctaggtttgtgtaagtacatgcagtgatgtttgcacaatgacaaaatcacctatgggtgcatttctcagaatatactcccattactaagtgacacatgagtgtttattgaatgactgttgggtgctgggatagaatctggggttttcaatgtgtgagtaaggtggggttggtttgaacaataaaggccatacattttatagagcttagattctaattagggtgagaaaacataaacacacgataaagtagtgcattaagacaatagcatgggttcctatcataagacactatatgattacggtgaggccaaagctcagtttaaaaccagtcctaccacctgtccctttcaaccttctcaggaaccttcagtactggttaccctttctcttctacactcactctgcatcttaaatagatcttctccattaccttgatacatactcggccttttttctgtttaaaaactatacaaacaaaccgtcttccagccctttgtcctttagttgccactctttcctccccagtcacagccaagcttatctaggattgtctttactcattgtctttgtttaatgacttccacttctgtcttaaccaactccaaactgaattctgcctccatcagtccacaaaacagttcctgctgagttcctcgatgaccttcctattgggctttttttagtatttatattgcttgacctttctgtgaatcttgaggatttagttttacttctctggcaactgttctctctcttatgtaggattcatcctcctcaacacaactgttagatgttgaacttgctcacggatcagtcctaggcccttttgtctttctacttatactgactccctggacagtcacatccatattcacaactgcagttacttcctacttacagataacttaccactctcagacctcccctcttagctacagtcccatctacccaactgcttacctggatattttcctttagatgtctctaaggcacttcaaattcaatgtatccacaaccaaattagtgatctcttttgactccagatgtggaccttcatccagtgggatttagttaaggtccttgtctaatcccaattcacaaagggaaactgtcataaaattgtaattttcaaacatattttaaaaatcatatttagtaattcttttccaactttaatgcattataataagaaacctttgatatctattgtttgatattcattgaaactactttcaggcctactatatgtttaatttttgcttatgtttcatatgtgcttgtaaagaatgttgtggcagattgtattttccaaaggtgatcacatcagcacatttatccaatcctgtgctcttcttacagtgtaacagacactccctcattgagggcggcaaggctgttgttctctttcttttagtctgggtgggggtttgtgactgacctgaccagtggagtgcagtgtaaatggtgttatgtgatttctgagcctaggtcataaaaaatacagcttctctcagaactcgtctttggaactcagccaccatgttgtgaggagactcaagccacatggagaggccacatggacatattccagctgctagctctagctgtggtctcagctaaccctgagcaacaactggcagatatgtgagggcatgagtcttcagatgatcccagcccctagcttagatatttgagggcatgagatatcagatgattccagcccctaactttcaagtctgctagcggaagcctcaggctttgtagcatacagaaaagccatcctgctgaaccctgccaggattcttgatccgtagaaaccgtgagagataataaattcttacttttatttttatttttttattttattattattatactttaagttttagggtacatgtgcacaacgtgcaggttagtcacatatttatacatctgccatgctggtgtgctgcactcattaactcgtcatttagcattaggcatatctcctaatgctatccctcccccctccccctaccccacaacagtccccagagtgtgatattccccttcctgtgtccatgtgttctcattgctcaattcccacctatgagtgagaacatgcggtgtttggttttttgtccttgcgatagtttactgagaatgatgatttccaatttcatccatgtccctacaaaggacatgaactcatcattttttatggatgcatagtattccatggtatatatgtgccacattttcttaatccagtctgtcattgttggacatttgggtcggttccaagtctttgctattgtgaatagtgctgcaataaacatacgtgtgcatgtgtctttatagcagcatgatttatagtcctttgggtatatacgcagtaatggcatggctgggtcaaatggtatttctagttctagatccctgaggaatcgccacactgacttccacaatggttgaactagtttacagtcccaccaacagtgtaaaagtgttcctatttctccacaacctttccagcacctgttgtttcctgactttttaatgattgccattctaactggtgtaacatggtatctcattgtggttttgatttgcatttctctcatggccagtgatggtgagcattttttcatgtgttttttggctgcataaatgtcttcttttgagaagtgtctcttcatgtccttcgcccacttgttgatggggttgtttgtttttgtcttgtaaatttatttgagttcattgtagattcgggatattagccctttgtcaaatgagtaggttgcaaacattttctccgattctgtaggttgcctgttcactctgatggtagtttcttttgctgtgcagaagctcttgagtttaattagatcccatttgtcaattttggcttttgttgccattgcttttggtgttttagacatgaagtccttgcccatgcctatgtcctgaatggtaatgcctaggttttcttctagggtttttatggttttaggtctaatgtttaagtctttaatgcatcttgaattaatttgtataagatgtaaggaagggatccagtttcagctttctacatatggctagctagttttcccagcaccatttattaaatagggaatcctttccccattgcttgtttttgtcaggtttgtcaaagatcacatagttgcagatatgcggcattatttctgagggctctgtactgttccattgatctatatctctgttttgctaccagtaccatgctgttttggttactgtagccttgtagtatagtttgaagtcaggtagagtgatgcctccagctttattcttttggcttaggattgacttggtgatgcgggctcttttttggttccatatgaactttaaagtagtttattccaattctgtgaagaaagtcattggtagcttgatggggatggcattgaatctataaattaccttgggcagtatggccattttcatgatattgattcttcctacccatgagcatagaatgttcttccatttgtttgtatcgtcttttatttcattgagcagtggtttgtagttctccttgaagaggtccttcatgtcccttgtaagttggattcctaggagcaattgtgaatgggagttcactcatgatgaggctttctgtttgtctgttattggtgtataagaatgcttgtgatttttgtacattgattttgtatcctgagactttgctgaagttgcttatcagcttaaggagattttgggctgaggtgatggggttttctagatatacaatcatgtcatctgcaaacagggacaatttgtccacttcctcttttcctaattgaatgccctttatttccttctcctgcctgattgccctggccagaacttccaacactatgttgaataggagtggtgagagagggcatccctgtcttgtgccagttttcaaagggaatgcttccagtttttgcccattcagtatgatattggctgtgggtttgtcatagatagctcttattattttgagatatgtcccatcaatacctaattcattgagagtttttagcatgaagagttgttgaattttgtcaaaggccttttctgcatctattgaggtaatcatgtggtttttgtctttggctctgtttatatgctggattacatttactgatttgcatacattggaccagccttgcatcccagggatgaagcccacttgatcatggtggataagctttgtgatgtgctgctggattcggtttgccagtattttattgaggatatttgcatcaatgttcatcaaggatattggtctaaaattctctcttttggttgtgtctctgccaggctttggtatcaggatgatgctggcctcataaaatgagttagggaggattccctctttttctattgattggaatagtttcagaaggaatggtaccagttcctccttgtacctctggtagaattcggctgtgaatccatctggtcctggactctttttggttggtaagctattgattattgccacaatttcagagcctgtcattggtctattcagagatccaacttcttcctgctttagtcttgggagggtgtatgtgtcgaggaatttatccatttcttctagattttctagtttatttgtgcagaggtgtttgtagtattctctgatggtagtttgtatttctatgggattggtggtgatatcccctttatcattttttactgcgtctatttgattcttctctcttttcttctttattagtcttgctagctgtctgtcaattttgttgatcctttcaaaaaaccagctcctggattcattaattttttgaagggttttttgtgtctctatttccttcagttctgctctgattttagttatttcttgccttttgctagcttttgaatgcgtttgctcttgcttttctagttcttgtaattgtgatgttagggtgtcaattttggatctttcctgctttcttttgtgggcatttagtgctataaatttccctctatacactgctttgaatgggtcccagagattctggtatgttgtgtctttgttctcgttggtttcaaagaacatctttatttctgccttcatttcgttatgtacccagtagtcattcaggagcaggttgttcagtttccatgtaattgagcggttttgagtgagattcttaatcctgagttctagtttgattgcactgtggtctgagagacaatttgttataatttctgttcttttacatttgctcaggagagctttacttccaactatgtggtcaattttggaataggtgtggtgtggtgctgaaaaaaatgtatgttctgttgttttgggatgcagagttctgtagatgtctattaggtctgcttggtgcagagctgagttcaatacctggatatccttgttaactttctgtcttgttgatctgtctaatgttgacagtgggttgttaaagtctcccattcttattgtgtgggagtctaagtctctttgtaggtcactcaggacttgctttatgaatctgggtgctcctgtattggatgcatatatatttaggatagttagctctacttgttgaattgatccctttaccattacgtaatggccttctttctctcttttgatctttgttggtttaaagactgttttatcagagagtaggactgcaacccctgcctttttttgttttccatttgctgggtagatcttcctccatccctttattttgagcctatgtttgtctctgcatgtgagatgggtttcctgaatacagcacactgatgggtcttgactctttatccaatttgccagtctgtgtcttttaattggaacatttagtccatttacatttaaagttaatattgttatgtgtgaatttgatcctgtcattatgatgttagctggttattttgctcgttagttgatgcagtttcttcctagccttgatggtctttacaatttggcatgattttgcagtggctggtactggttgttcctttccatgtttagtgcttccttcaggagctcttttagggcaggcctggtggtgagaaaatctctcagcatttgcttgtctgtaaaggattttatttctccttcacttatgaagcttagtttggctggatatgaaatgctgggttgaaaattctttcctttaagaatgttgaatatgggcctcctccactctcttctggcttgtagaatttctgccgagatatccgctgttagtctgataggcttccctttgtgggtaacccgacctttctgtctggctgcccttaacattttttccttcatttcaactttggtgaatctgacaattatgtgtcttggagttgcccttctcgaggagtatctttgtggcgttctctgtatttcctgaagctgaatgttggcctgccttgctagattggggaagttctcctggataatatcctgcagagtgttttccaacttggttccattctccccatcactttcaggtacaccaatcagacgtagatttggtgttttcacatagtcccatatttcttggaggctttgtttgtttctttttattattttttctctaaacttctcttcttgcttcatttcattcatttcatcttccatcattgataccctttcttccagttgatcgcatcggctcctgaggcttctgcattcttcacgtagttctcgtgccttggctttcagctccatcagctcctttaagcacttctctgtattggttattctagttatacaatcgtctaaatttttttcaaagtttttaacttctttgtctttggtttgaatttcctcctttagctcggagtagtttgatcgtctgaagccttcttctctcaacttgtcaaagtcattttccatccagctttattccgttgctggtgaggaactgcgttcctttggaggaggagaagcgctctgctttttagagtttccagtttttctgctctgttttttcccatctttgtggttttatctacttttggtctttcatgatggttatgtacagatttttggtgtggatgtcctttctgtttgttagttttccttctacgagacaggaccctcagctgcaggactgttggagtttgctagaggtccactccagactctgtttgcctgggtatcagcagcagtggctgcagaacagcggattttcgtgaaccgcgaatgctgctgtctgatcgttcctctggaagttttgtctcagaggagtacccggccgtgtgaggtgtcagtcagcccctacttgggggtgcctcccagttaggctgctcgggggtcaggggtcagggacctacttgaggaggcagtctccccattctcagatctctggctgcgtgctgggagaaccactgctctcttcaaagctgtcagacagggacattgaagtctgcagaggttactgctgtctttttgtttgtctgtgccctgcccccagaggtggagcccacagaggcaggcaggcctccttgagatgtggtgggctctacccagttcatgcttcctggcagctttgtttacctaagcaagcctgggcaatggcgggcgcccctcccccagcctcgctgctgccttgcagtttgatctcagactgctgtgctagcaatcagcgagactccgtgggcataggacccttcgagccaggtgtgggatataatcttctggtgcgccgtttcttaagcccatcggaaaagtgcagtattagggtgggagtgaccctattttccaggtgccgtctgtcacccctttctttgactaggaaagggagatctctgaccccttgcacttcccgagtgaggcaatgcctcaccctgcttcggcttgtgcacggtgctctgcaaccactgtcctgcgcccactgtctggcactccctagtgagatgaacctggtacctcagatggaaatgcagaaatcacccttcttctgcattgctcatgctgggagctgtagaccggagctgtttctattcggccatcttggctgccagccaccacttttatttttaaatatctagtttttggataatttgttatatgtcaataaaaaacgggggatggagccaagatgaccgaataggaacagttccagtctacagctcccagtgtgagcgacacagaagatgggtgatttctgcatttccaactgaggtaccaggttcatctcactggggagtgcaatacagtgggtgcaggacagtgggtgcagcgcactgtgtgtgagccgaagcagggcgaggcattgccttatccgggaagcgcaaggggtcagtgaattccctttcctagtaaaagagaggggtgacagatggcacctggaaaatcaggtcactcccaccgtaatactgcacttttccagcaggattaacaaacggcacaccaggagattatataccgcacatggctcggagggccctacgcccacggagcctcactcattgctagcacagcagtctgagatcaaactgcaaggcggcagcgaggctgggggaggggcgcctgccattgccaaggcttgagtaggtaaacaaagagaccaggaagctcgctctgggtggatcccaccacagctcaaggaggcctgtctgcctctgtaggctccacctctgggggccgggcacagacaaacaaaaggcagcagtaacctctgcagacttaaatgtccctgtctgacagctttgaagagagtagtggttctcccagcacgcagcttgagatctgagaatgggcagactgcctcctcaagtgggtccctgacccccgagtagcctaactgggaggtaccccgcactaggggcgttctaacacctcacacggccgggtactcctctgagacaaaacttgaacgatcaagcagtagcatttgcggttcatcaatatccgctgttctgcagccacggctgctgatacccaggcacacagagtctggagtggacccccaggaaactccaacagacctgcagctgagcatcctgactgttagaaggaaaactaacaaacagaaaggacatccacaccaaaaacccatctgtacgtcaccatcatcaaagaccaaaggtagataaaaccacaaagatggggaaaaaacagagcagaaaaactggaaactctaaaaatcagagtgcctctcctcctccaaaggaacgcagctcctcaccagcaatggaacaaagctggatggagaatgactttgatgagtcaagagtagaaggcttcagatgatcaaactactccgagctaaaggaggaagttcgaaccaatggcaaagaagttaaaaaccttgaaaaaaaattagatgaatggctaactagaataaccaatgcacagaagtccttaaaggacttgatggagctgaaaaccaaggcacgagaaccacgtgacgaacgcacaagcctcagtagccgatgcgatcaactggaagaaagggtatcaatgatggaagacgaatgaaatgaagcgagaagagaagtttagaaaaaaaataataaaaagaaacaaacaaagcctccaagaaatatgggactatgtgaaaagaccaaatctatgtctgattggtgtacctgaaagtgacggggagaatggaaccaagttggaaaacactctgcaggatatcattcaggagaacttccccaatctagcaaggcaggccaacattcagatttaggaaatacagagaatgccagaaagatactcctcaagaagagcaactccaagacacttcattgtcagattcaccaaagttgaaatgaagtaaaaaattttaagggcagccagagagaaaggtcgggttacccacaaagggaagcccatcagactaacagcggatctctcggcagaaactctacaagccagaagagagtgggggccaatattcaacattcttaaaggaaagaattttcaacccagcatttcatatccagccaaactaagcttcataagtgaaggagaaataaaatcctttacagacaagcaaatgctgagagattttctcaccaccaggccagccctaaaagagcccctgaaggaagcactaaacatggaaaggaacaaccagtaccagccactgcaaaaacatgccaaattttaaagaccatcaaggctaggaagaaaccacatcaactaatgagcgaaataaccagctaacatcataatgacaggatcagattcacacataagaatattaaccttaaatgtaaatggactaaatgctccaattaaaagacacagattggcaaattggataaagagtcaagacccatcagtgtgctgtattcaggaaacccatgtcatgtacagagacacacataggctcaaaataaagggatggaggaagatctaccaagcaaatggaaaacaaaaaaaaaggcagggtttgcaatcctagtcactgataaaacagtctttaaaccaacaaagatcaaaagagacaaagaaggccattgcataatggtaaagggatcaattcaatgagaagagctaactatcctaaatatatatgcacccaatacaggagcacccagattcataaagcaagtcctgagtgacctacaaagagacttagactcccacacaataataatgggagactttaataccccactgtcaacattagcagatcaacaagacagaaagttaacaaggatatccaggaattgaactcagctctgcaccaagcggacctaatagacatctagagaactctccaccccatatcaacagaatatacatttttttcagcaccacaccacacctattctgaaattgaccacatagttggaagtaaagcactcctcagcaaatgtaaaagaacagaaattagaagaaactgtctctcagaccacagtgcaatcaaactagaactcaggattaagaaactcactcaaaaccactcaattacatggaaactgaacaacctgctcctgagtgactatggggtacataacgaaatgaaggcagaaataaagatgttctttgaaaccaacgagaacaaagacacaacataccagaatctcttggacccattcaaagcagtgtatagagggaaatttatagcactaaatgcccacaaaagaaagcaggaaagatctaaaagtgccaccctaacatcacaattaaaagaactagagaagcaagagcaacactcaacactagcagaaggcaagaaataatgaaaatcagagcagaactgaaggaaatagagacacaaaaaacccttcaaaaaattaatgaatccaggagctggttttttgaaaagatcaacaaaattgatagacctctagcaagactaatgaagaagaaaagagagaagaatcaaatagacacaataaaaatgataaaggggatatcaacaccgatcccacagaaatacaaactaccatcagagaatactaggaacacctctatgcaaataaactagaaaatctagaagaatttgataaattcccagacacatacaccctcccaagactaaaccagaaagaagttgaatctctgaatagaccaataacaggctctgaaattgaggcaataagtaatagcttaccaaccaaaaaaagtccaggaccagatggattcacagctgaattctaccagaggtacaaggaggagctggtaccagttcttctgaaactattccagtcaatagaaaaagaggaaatcctccctaactcattttatgaggccagcatcatcctgataccaaagctgggcagagacacaacaaaaaaagagaattttagaccaatatccctgatgaacatcaatgcagaaaccctcaataaaatactggcaaaccgaatccagcagcacatcaaaaagcttatccaccatgatcaagtgggtttcatccctgggatgcaaggctggttgaacatatgcaaatcaattaacgtaatccagcatataaacagaaccaaagacaaaaaccacatgattatctcaatagatgcagaaaaggcctttgacaaaattcaacaactcttcatgctaaaaactctcaataaattaggtattgatgggtcatatctcaaaataataagagctatctatgacaaacccacagccaatatcatactgaatggacaaaaactagaggcattccctttgaaaactggcacaagacagggatgccctctctcaccactcctattcaatatagtgttggaagttctgtccagggcaatcaggcaggagaagaaaataaagggtattgaattaggaaaagaggaagtcaaattgtccctgtttgcagatgacatgattgtatatctagaaaaccccatcgtctcagcccaaaatctccttaagctgataagcaacttcaggaaagtctcaggatacaaaatcaatgtgcaaaaatcacaagcattcctttacaccaataacagacaaacagagagtgaaatcatgagtgaactcccattcacaactgcttcaaagagaataaaatacctaggaatccatcttacaagggaggggaaggacctcttcaaggagaactacaaaccactgctcaatgaaataaaagaggatacaaacaaatggaagaacattccatgcccatgggtaggaagaatcaatattgtcaaaatggccataatgcccaaggtaatttatagattcaatgccatccccatgaagctaccaatgactttcttcacagaattggaaaaaactactttaaagttcatatggaaccaaaaaagagcctgcatcaccaagtcaatcctaagccaaaagaacagagctggaggcatcacactacctgacttcaaactatactacaaggctacagtaaccaaaacagcatggtactggtaccaaaacagagatatagatcaatggaacagaacagagccctcagaaataatgccacatatctacaactatctgatctttgacaaacctgagaaaaacaagcaatggggaaaggattccctatttaataaatggtgctgggaaaactggcagccatatgtagaaagctgaaactggatcccttccttacaccttatacaaaagttaattcaagatggattaaagacttaaatgttagacctaaaaccataaaaaccctagaagaaaacctaggcaataccattcaggacataggcatgggcaaggacttcatgtctaaaacaccaaaagcaatggcaataaaagacaaaattgacaaatgggatctaattaaactaaagcacttctgcacagcaaaagaaactaccatcagagtgaacaggcaacctacagaatgggagaaaatttttgcaatctactcatctgacaaagggctaatatcccgaatctacaatgaactcaaataaatttacaagacaaaaacaaccccatcaaaaagtgggaaaaggataagaacagacacttctcaaaagaagacatttacgcagccaaaagacacatgaaaaaatgctcaccatcactggccatcagagacatgcaaatcaaaaccacaatgagataccatctcacaccagttagaatggcaatcattaaaatgtcaggaaacaacaggtgctggagaggatgtggagaaataggaacacttttaccctgttggtgggactgtaaactagttcaaccattgtggaagtcagtgtggcgattcctcagggatctagaactagatataccatttgactcagccatctcattactgggtatatactaaaaggattataaatcatgctgctataaagacacatgcacacgtatgtttattgtggcactattcacaatagcaaagacttggaaccgacccaaatgtccaacaatgatagactggattaagaaaatgtggcacatatacaccatggaatactatgcagccataaaaaatgatgagttcatgtcctttgtagggacatggatgaagctggaaaccatcattctctgcaaactatcacaaggacaaaacaccaaacagcgcatgttctcactcataggtgggaattgaacaatgagaacacatggacacaggaaggagaacatcacacactggggattgttgtggggcggggggtgggtgggatggcattaggagatatacctaatgctagatgatgagttaatgggtgcagcacaccaacatggcacatgtatacatatgtaacaaacttgcacgttgtgcacatgtaccctaaaacttaaagtataataataataaaattttaaaaaaagaatataaatactttctcttctattattgctaactttcgtcatgcctaacaataacttattccgtcagcttttttttggttcctatttccgtggtgtgtacttatccacacttttcttttcaaaacttatgtttaaatttgtttcttataaacaacacatagcaagattttaaaacattcgttttgataaaattttaacagatgtacttaccctgattcctgacacagctggacttagttaaaatattttcttttttatattctattcagcgtgttttcctttgcttctttctcccttccatttcaatgttgtatagagaatcgattgcgtttactctatgttgtttcctctattgatttggaaatttctgttcttttggtggttactcttgtatgttttaaaattcggaaatagagcctacatgcaaaataatttgtgcaagtgtacatatacagtttaaagaaaataataaactgattgtccagatacctctttctaggccaagaaacagatcattaccatattccagaagcccccccattcctctcacgtattccatctcctctcccactctcaagataaagatagcctgaattctgtgtaaatttcttccctttctttattttgttttgtaccacttatactttatattcaaaaacaacacagtatttatttttgcctttttgaatgttatacaaatagaataatatgtatagctttctgtgacttgcttcttttgttttacattatattttgagaggtatctatgttgatgtgggtaactttcactgattttccaaagttatataatactccattctaagaatatgtaaaaaaagtgtttatcgtattgctgatagatgtttgggttgttttctgtattttttgccatcctggcaatacatttgtagaatgtaaacattgtacaaatctctgtgagtacatgtgtaagggcctctttgcttatatagacagagaaagaaatgctggttatccttaacaagttaatcagtagttttagtgcatatctttaatgccttaagtagtatttctctcctccttgtaaacaatttattacccccttctttattccatatgattgtgataaaccactcagtttcactttattggcaaatgctaaaaattgttttgttttgtttttttacaagtagggcttaataattattaatcaatacccattacttattattaaagttaccagatttaccatcatgcttactaatttctctgtttactattgcttcttgtttctcactgcttccttctgggataaattcccgcttattcaagcatatcttattttagtatttcttttggcaaaagtaaactactgtgagcactaaacaattttttttttgaaaaatgttctgatttatctattgttctctatcattcttgaatgttaggtttagcatgggcatataatttttctttttttttttttgagaaaaagtttctctcttgttgcccaggctggagtgcaatggtgcaatttcagctcactgcaacctctgcctcctgggttcaagctattctcctgcctcagcctcctgagtagctgggattacaggtgcccaccaccacgcccagctaatttttttttttttttttttttgagacggagtctcgctctgttgcccaggctggagtgcagtggtgcgatctctgctcactgcaagccccgcctcccaggttcacaccattctcctgcctcagcctcccaagtagctgggactacaggcgcctggtaccacacccatctaattttttgtatttttagtagagatggggtttcaccatattagccaggatggtctcgatctcctgacctcgtgatctgcctgcctcggcctcccaaagtgctgggattacaggagtgagccaccgcgcccggcctgtatttttagtagagacaaggtttcaccacgttggccaggctggtctcaaactcctgacttcaggttatctgcctgccttggtgtcccaaagtgctgggattacaggcgtgagacacagtgtccgcactgttgctttactttcatttttgctaatgacatgttcttttgctagaagtctcttttttttccctctctggttgactttaagattttatttttatctctgcgttctgtggtttcattctgatatatgaaagtatgcatttgcttttatttatctttttgagatattgttatactttttccagaggactcatgtctttcattctagaaactctacatccatatatttttatattggctttctctctctctttttttttttttaacgaaaaagtaaactttaatgtcaaaaatgcaaacttggggaagaacagaaaagatcacacacaaggctgtcacttcacacttggaaggttgcacagcgtccgggcagaggcgctcctcacttcccagatggttgggcagccgggcagaggcactcctcacttcccagacagggcggctgccgagcagaggcgctcctcacttcccggacagggcagcggccaggcagaggggcccctcacttcccagatagttgggcggccgggcagaggcgctcctcactcccagtcagttggccagccgggcagaggggctcctcacttcccagatggttggcggctgagcagaggcgcttctcacttcccagacggctttttctctttcttttgggcttggctatatatgtgtgtgtatgtgcgtgtgtgtgtgtgtgtgtgtgtgtatctatgtgcgtgtatatatatgtaggtatatatatacacatgtgtatgtatatttgtacatgtgtgtgtatatatatgcacatatgtatatacatacacacacatatatatacacacatacacacacatatatgtattttaagtcattattgtattttgtttagcatttctgtgtttgaagtggaaagggattcagctcaatctccatgttatcagattattcatctcttagatttcacaaatgcaatattacactattttatctaatattctccaaactctgcttgttctaaactcattggtaaacggtgtagctcagggggaaggagaaatttctgatgctgtcccatagaagggacctacctcctgcattaatagtctgaaatttacatcttagcccgtaagtctgacctgttctttggtggtcatgcatcagtggtaatgcattctttgatggaatagagggatgtggagggaaacagcccagtaaaagctaaaacaatcccttcagatattgaaggaaaaaaaaagaaccatggaaaagctgtggtgtagctgtctatccccaactactgcacctttcggagatgttaggacctagccaaaaatgagagaaagaatcatattcccattactggtgactgtagaggcaccttatgagtaagattggatgattaaagaaccagcttcacgaaactgtaagttattactgttgcttttgcagatcttttgtcacattgatttgtgtgtggtcagtgcatagtatttatgttttgatcacagagagctgaagttaacaagatttgatttgaaatgtcaagttgtggcttcctctgttttgtgagtttcttccgagagaaggctgcagtctacatacaggaagggtgattgtccctgtaatcatgcacacatatacttacggagcaagtggtgaggtttatattagaaggaccatgcatgtcatataaatggaataggcatccctaagtgaaactttttcagagaaatggaaatagagcatgcaagaaagatgacaaaaagaaataagaaaataaaatgcttagtcagactgagtatgtcacactcatgtttaatttgattttcatctcgctataagccgttcccattctgttgaggagtacacactccaaaagatttgactgtagatttggccaaggtttgtgtgcttcaattctgggtagatgtgtgcaccattttcagtttctgactgtctttttttggcctcttgtgcgggaggtatgaggcacaagttttatcaatggtttatttggctagcaccatataccatggcatatggaaattctatttagagacatggggagaaaatgtttgttgttgtactcacagacaactctgtctttcatttttatgtctttgtagctttgaagctcaggaaagaagagaaatccactgagaacagtctgtaaaggtaagtgtatttattacatggccttgacaaacattgcctttacaacattgatttttcttttattcagagatttaaacacttggactaaagatatagctgacaggacaacttccttaaccacctgcttgtcctccctcttaggcaaaagtgctgagcaatagttagcagagagcaggaggaaataaaatgatgtgttgagagtagacaaatgcaattgtatgcttgctgacttttgctttcttctcagcagctaagacattccaatggagctaagtttactaagattaatgctagatggaaaaagaatgcacttgtaccacttctggccaatagttaaataaaactagctggccaaataaagcatttaaaataaaatgcagagtggcatttcaattgggttgaatgaaatttattgtgaaagtcagttgtgcagttgcatggaagagccagttttgtagaaagaaaagagccactgaatttggtgtatctaatttcattccacccagtcactctgagccctaaatgaattacaggaaatgaacttccaagcttgaagcaatgggaaaagtacctactcggtctcttgtgaaacattacaatcaagttggtttttacatggaaaaatgtaattgtttcctgtttgctaggtatatttatgagcatacctctgtacagctttgttctttgattcattgtttaatttctgttctgcatgaagtattttaatttaaagaattcattctgggcaattatagggctgcggtttcatcaagagtctttggtggccagggtgaaatatgctataattttacatttgttttcatcataaattacatttttgatacttttagggtttttttctgtcatttttattgcagcaattattactatgaccactttagttaaagttgaaaagccattttgatttaccatgtactttaagttcttcctaacttcttgacaaatctatttctggggctgaatttttcatgtttatttggagggcaaagaagaattttacagggatattggagaaaaccccttttagataataaaaatatgagttataaaaaaatcctcttttcttaggatttgctttggggcaactaaactctggtgcatgaaaactggttggcttggaattttgccataattgttgaacatcagtgaagaaattactatcttaagcagtagataattcttatttttggccatacaactacatgtctctggaccattgagccacatcttggaataaagaaatacttgatagcttttagaaataaatgctcatgaataattggatttggtggtgatgtagccatcttaacaactttgtaatcttttggcacagatatggtgcttcctttcctcttggggaatgtttccacacaggcacagtccattttctttattctcaatgaaaatcttttgttgaattggtactctggaatcagacatgggtttagtcatgatttggcttttactagctgttggactgcggacaacttattcaccctcttagagtctcagtttcctgatctgtgaagtggggataatactgtttttggcttcatgtaggtgtggagaattaaatgaagtattctgtgtcaaggacttagaagtcctggcccatgataagtgctcagtagatgtgagctgccactgctcttattaatatcatcatcatcatcatcatcatcatcatcatcatcggcggcggcagcagcagcaacagcatctttatgaatttattcattatacatttttataagtctattctttttagaagcttcaggataatatttctaaaataagcatgttgctaccaaagaagggaaaattctgcttggtccttaggaatcaaatgaaaaggtaactttcaggtaatacaggaagtgaggcctctggaagtgaaaagttattaggctgaagttttgtaggtattaggaaaactaccttccttggttgtcatcaattactagttaatagtcttgagaaattaagagtctactgctagttagcttcttcaagaatttttaaagaaagccttggtagtatagagggaacccccccaccaattttttttttctgtcgtgtatgtttttccttcctaacagcatctttatttctttttgaggtaattaggctagtggaactgtaaccaggggccctactcaggggcctgcaccctgcctatggatgggtgtatgaccacaagcttggctaagtaaatgctccttctttggaatttgattctttagctaaaggattctcccttgtcctaggtgggcattctgatctgccaacatgtactatgagaccactgttgcctccatgtctgtcttggctagtagtcatggcctccaaaccttattttccattctgccatggattggctgagactccagtatccttccaataattcttaaattagccaatttgtttcttctgcttgcaactacagaaccctcattgatagtatagtctattcattagtgagctagatctggaataaatatggtatgtttggaggtttacaattaaaatgccactcattactttctttcatcatgtgtaagtagctcagtgttttgcagtagattacaaaaagtacagagttctttattagactctcaaaaatgggttattttgctgaacttcccagtactcctgtgtttggtacagaaaagtcactcttggctgcttctcttagctctcaaagaaggtgtatgtatgtgggcgtagagctggaaatgagaagagaagcggagaagtcatccctcccaatttctggggccctggtctctttgtgtcatggggattgttaagggactgagattttcttcggtttacccccagcaaccccaaacacaacaggtatattctttagacatttgtctacttttccctgaatttttatttctcatttgaacactgttcttaccctactgagcaccttcttttcaatgatgtgtaaaatgtgattgaaaactcaattacttccagttctggcattgcttgtggaatgtagaatgagaatggaatgggcaagttttctctatttccccttgtgtcttatttgttgactacttctgtgctctgtgcagtgcctagaacaaaacttgttaatttttttttaacaggtatatcaattttgcactcctactgtgaataaatagcatgacagtattatatggaaggaagagccttagctggggtattaggaaacattccttctagttttggctctgccatttgctagctttgtgactctgtgcaagattcctaactttctttaagatctgaggttcctcacctgtaaaatgaggataacttttgccctatttattgcacagggctgttttgaggatcacatgaagacaatatatatgaaagtgcttagtaaattttaacaaatgcataacatcagtttattactatcatgccatgaatatttcttaaacagatgaaaatttgaggggcttgttttaggaggctgagtaggaaaaagagacagattaaacaacaacaacaacgacaacagcaacaaccaccttgtatagtgcttgtgctgggtattcacatttgtgcttccagctcctctctcttctaaatggctctgcaccatgggcctaacctctatcgcaggcattctctgggctcccttgtttgctggctttctgttgtattagccaggggaaggaactggatgaagacctgggaacacgaggttgaaatattcttccctactttcttccctgcagcattgtgggttggcaatggctgtatccctctaaggaaggccacagttccggttgggggcctctcttcagcggctacagctttttctactgtctggtaactgcctcttcccttttcccctttgagtctggagtgttaatggaatttttgctaagtccagcacactagaccatcccttagtggtcttcccttaaccctgccttcaccccaggtgaagatgtcatctccttcctgctgtgaccttgattgtacaaaggaactttgttctttatatatttttccaccatcctcagcccaattcagcaaatatctttttaggatttagagtgtgccaggtaaaaagtaagtctttattgtacacttttaagaaatggacattttgattgcatagttggagatattatatcttttttttttaaaagcaagttttggtaaattgaaaagctttatagtagcctcagtgtataaagaaataccatattgtacttatatgcattacaaattaccttttacattttatttttatttttatcaaagcagtgtatctacattgtttaaataaaacagcattaaatagcaaatatttaaaaactgcaacatctatgccttctttctacctctctctggattgcttcccagaattagcaactttctattctgatatttctggtgttcacctctctctttctaaataatgtacttatattattttttcctaatttatcaattttagcaatagctctctgatcctttccactcttaccacttctggtccccacagcctcctgacatagttatattacaatttttatttaaatcaacaggtaatatttacattatcatgattacgtaatttttttctgttgctaagccgaatggtatttgttatgttttctttaatataaaattttttgtctttcttggaattaatatgtgcttttaaaaaaatttgcctactttaggcatctaccttataaggtaggtagtaatagcatgtcaatttcataggtgggtcatattagtatttccattttatagttgtagaaattgagacttaaggctaagtattttttccaaggtcacatagctagtaagtgttagaactgggagaagacaccagccagtctgttcacagagcctgcattcttaatcattatattacttacaaatactgtcacttcagttatcctgatggctacttaaaaaaaatttctgagttctatcttcagagattcaaaatcagtggggctgaggtggagaaccaaaaatctgtattgtaaaaagctctaggggtgattccattgatcagcaggtttgagaacttctgttccatatcctatcattaccgtaattaccatcatcacaatcatgatcatcaacatcattatcatcttcatcatcatcaccaccactaccatcagcaataacatgtcttgctcagtgctctcagtaattgactagaaatcctggtgtctgttaaagcagctaccttttgacttcataggtgagatcatcacactagtgggtgattcagtaataattcatctggccatttttttttctttttttttgagaagtgctttgggagaaattatgtcccatagaagtagacaagcttattttttttcagctcagccggttgttgctttatctggtacaaaagcaatgagaactttgtccctgtacttaactctgacctttaagggacttttttttttctttcttccctgagagttccctaaatgacatctgggcaaatacaaagtcctagtgaaagagaaactttgaagtctttgttctgtttgatttccacttcccccactatcacaccccccactaaccacccccctcgccccttgcttatggcatttcttgtttatcacgtatgagagaagcaataaaatttggcctggggttttctcatccctaggtgtgaaattatttcagaactataataataatactttgcatttgtatagtgcttttatttgaagatctaaaagtgttcttttggtgttaatagagcttcccatcaccctctgaagtaggtaagtattattagaggatatttccttcaagaacattttcactttacataccatgtgtgacttgaaaatgcttttgtattatttgggaatctcaactctttaaagtgctatacatataaggcaattcttttatttatattcaatcttcattaatgcccagaacattgagggaaatgcaattcctcataaatgaatgtggcgttatttagaaagtattaggataaaagccgtttggtattgccttttattggaatgttttgaaaatatttaataatgctcattagctacagaactacctgttgtacagttagttttccttttttttaaggtagcaggatttgcaggaaggaaaatattaaataactagtggtgtcgggtcttagaacccaatcccccaaagtatggtaccttagcatcctgagtactttgaactgaaggaaatacattggaaagccctcagaaccaaggtctttgtggcagtctcccataatactgtctcctacttctcttcctccccttaagcaagtcgtataaaccagaattcctcttccctaaggtgggtcatagaaactagaatgtctcttccccacagcaagccattaaacctagaaaagtcactctcttccttctcctttgaagatcctcattccatagaggccctgctccatactgggaagaaagaacgttacacagagaggccaataagaatctgaatagtcaggccttgctgatccccaccaccacccccaccaccgccaatctattttctatttccagtagaacacaccccttttgttctaccacatttctacacagctgtgcattcttcactgaacctaagcataaaaactattttcctttagtctttgggtcttcatttcggaaggctgctatgtcacataaaactttgattaaatacatttgttatgcttttctcttgctgacctgtcttttgttataggaatgttggctgtgactcttgtgagaggtgaggaaaggtatcacacctttccatccctacagtgggaacttggcctggtattgtggaatcctgtggttgctcatgatgtgtcaaatcaactaaaaatacaaactgagtgtgcactctgatttaaagatttcattctgaaaaattgttttgaatgctgcatgaattgcaagcatgcatacatgcataactggttactttttttttctctaaatgttgggaagttctaagtggtgtttggagtgtctgctcacttaaggtcattgatgcaaaaatgctgcaggtctgttatagcataaaacatttttaaaaaggccccctgaactttagtccactctggtcaccatgagaggcttcttgtccatgcattgttgggtagtcctgttgtatctgtgcaaagaaggctgggattttcgctgtggcttcaaggccttggtagtcattttcccagtatcccatcactatcccgatcaaaagtcctgtcacctctctagagttctgccaggaagcagggtgccagcgtccactactttaaggaactgctccagcttctctccaataccaggaaagcccaatccttactgtactccaagtgcccacctaaacagatcaaagaacaacacttttaagcaaaacaaaacaacccaaattgtctttattttggacctttctgctgggatgtaacacattcccttcaatgaatttaggcttttttgaaaaagaaaagtctttaatggagactggatttaggggattggtggttgtcttttagcatcttttgcgtttgaatatgtctgggagacaaagggaagaaggcaaagtcttgaagtttttgagatgcgaaagggaacagtatacacaggagggataacaaagagtacaaattgatattttaaaattatgctgcccctaattcaacactgagacaaggtgatgcctcaccatttgtgtggtactttatgactcccatgataagtgtcagatgatcacatgattaatcctttttctggcatctcagttgtctttttttttgtagagagaattcactgaagacccatcatctaaagattttggggaatgtgggtggaattatgaatctctgcatcattttctcctgagtctttgctcaaaggaggccacataaatttgctgctaattatgtgaagatggatttatcaccgaagatgcctttggctgcaaataatcaaaaagtcaacttgaaatggttcaaacaataggggaattaaaagaaaaaagctccctgccctctgcaagtctacctgctgccccagggatgtcatgattgatgggaaggcattatagaatcctggctccaaatgtctggaatctaactgcaatccacttttgccaagcaactggggacccaccagggtgcctttgatggttgtcactgtgtagcagggagaggattttgagcactcagctattgacagattgctaagcactgtcaattattttgtgaattgctctaccaagttacatttgaaaatccaccaaataaaaacccatcagaataagagaaatgaattatctcagggaataagacctcctgggaggggtgcagtttcaagttttgttaattcagtggctcaacattgttaccaaagtgtctatttcttgctctttttcctgtgccatcttcagtgtgttgacttagttcttagactggctgccttcatagttctaagatggctggttcctttttgggagctacaggcagacatggcaacatccactggcaaaataaaatatctgttcttatatgtccctttttaaaagcaaggaactgttcctgtaacccctgagctgacttccccttaagtctcatttagttgattgcagtcccatgctccttcctaaatcagacactggcacgcggaatggggctcatccctggtggcttagattggtgcttcccaactttgttcttgttatggtgcacatagaaaatacaatttggccggcatgttaagcaatcagaagaggctgctcacagctggagtggctgatgtgtgtgtgtagggcatgggtgtggggtctctggctgctctgggtctgcccagctgcccttggagctaaagggatatcagagcagctgttaaccctttccctgttttaaactaatcgggttttatctcttttctgggataatctcaccttcccttgagtacatagctttatggagggaggccaccctaataaaactggggcttatactagtcaggattcttcagagaaacagaaccaaaaggttatttattggtttatttacttattgtgaggtattggcttatgtgattctggaagctgagaagttccatgatgtgctgtctgcaagctggagacccaggaaagccggtggtgtaattcagtccaagtcctaaggcctgagaaccaagggagccaatggcataatcccagtctgagggccggcaaagatgagatcatgtatcccagctcacacagtgaagcagaaacagggcaaatttctccattctcctccttttcttctgttcaacaaactgggtgatggccttctgtttaaatgctaatctcacccagaaacaccctcacagacacatccagaaataatatttagtttgggcaccccatggcccagttgagttgacacagaaaattaaccagcacagggctttacctgtgaggtgaaacaggaaaatttctttttttattttattttttttttattatactttaagttttagggtacatgtacgcaatgtgcaggtttgttacatatgtatacatgtgccatgttggtgtgctgcccccattaactcgtcatttagcattaggtgtatctcctaatgctatccctcttccctccccccaccccacaacaagccccagtgggtgatgttccccttcctgtgtccatgtgttctcattgttcaattcccagctatgaatgagaacatgcggtgtttggtgttttgtccttgtgatagtttgctgagaatgatggtttccagcttcatccatgtccctacaaaggacatgaactcatcattttttatggctgcatagtattccatggtgtatatatgccacattttcttaatccagtcaatcattgttgggcatttgggtcggttccaagtctttgctattgtgaatagtgccacaataaacatacgtatgcatgtgtctttatagcagcatgatttataatccttttagtatatacccagtaatgagatggctgggtcaaatggtaattctagttctagatccctgaggaatcaccacactgacttccacaatggttgaactagtttacagtcccaccaacagtgtaacagtgttcctatttctccacatcctctctagcacctgttgtttcctgactttttaatgatcgccatgctacctggtgtgagatggtatctcattgtggttttgatttgcatgtctctgatggccagtgatgatgagcattttttcatgtgtcttttggctgcataaatgtcttcttttgagaagtgtctgttcatatccttcacccacttgttgatggggttgtttttttcttgtaaatttgtttgagttcattgtagatttggcatattagccctttgtcagatgagtagattgcaaaaattttctcccattctgtaggttgcctgttcactctgatggtagtttcttttgctgtgcagaagtgctttagtttaattagatcccatttgtcaattttgtcttttgttgccattgcttttggtgttttagacatgaagtccttgcccatgcctatgtcctgaatggtattgcctaggttttcttctagggtttttatggttttaggtctaacatttaagtctttaatccatcttgaattaacttttgtataaggtgtaaggaagggatccagtttcagctttctacatatggctagccagttttcccagcaccatttattaaatagggaatcctttccccattgcttgtttttctcaggtttgtcaaagatcagatagttgtagatatgtggcattatttctgagggctctgttctgttccattgatctatgtctctgttttggtaccagtaccatgctgttttggttactgtagccttgtagtatagtttgaagtcaggtagcgtgatgcctccagctttgttcttttggcttaggattgacttggtgatgcggggtcgtttttggttccatatgaactttaaagtagtttattccaattctgtgaagaaagtcattggtagcttgatggggatggcattgaatctacaaattaccttgggcagtatggccattttcaccatattgattcttcctacccatgggcatggaatgttcttccatttgtttgtatcctcttttatttcactgagcagtggtttgtagttctccttcaagaggtccttcccatctcttgtaagttggattcctaggtattttattctctttgaagcaattgtgaatgggagttcactcatgatttggctctctgtttgtctgttattggtgtataagaatgcttgtgatttttgcacgttgattttgtatcctgagacttagccgaagttacctatcagcttaaggagattttgggctgagacgttgggattttctagatatacattcatgtcatcggcaaacagggacagtttgacttcctcttttcctaattcaataccctttatttccttctcctgcctgatcgccctggccagaaattccaacactgtgttgaataggagtggtaagagagggcatccctgtcttgtgccagttttcaaagggaatgcttccagtttttgcccattcagtatgatattgactgtgggtttgtcatagatagctcttattattttgagatatgtcccatcaatacctcattttttgagagtttttagcatgaagggttgttgaattttgtcaaaggccttttctgcatctattgagataatcatgtggtttttgtctttggttctgtttatatgctggattacatttattgatttgagtgtattgaaccagccttgtatcccagggatgaagcccacttgatcatggtggataagctttttgatgtgctgctggattcggtttgccagtattttattgaggatttttgcatcaatgttcatcaaggatattggtctaaaattctctttttttgttgtgtctctgcccagctttggtatcaggatgatgctggcctcataaaatgagttagggaggattccctctttttctattgattggaatagtttcagaaggactggtactagctcctccttgtacctctggtagaattcagctgtgaatccctctggtcctggactttttttggttggtaagctattacttattgcctcaatttcagagcctgtttttggtctattcagagattcaacttctttctggtttagtcttgggaggttgtatgtgtccgggaatttatcaaattcttctagattttctagtttatttgcatagaggtgtttatagtattctctgatggtagtttgtatttccgtgggatcggtggtgatatcccctttatcattttttactgcatctatttgattcttctctcttttcttctttattagtcttgctagcggtctatcaattttgttgatcttttcaaaaaaccagctcctggattcattaatttttcgaagggttttttgtgtctctatttccttcagttctgctctggtcttagttattgcttgccttctgctagcttttgaatgtgtttgctcttgcttctctagttctttaatttgtgatgttagggtgtcaattttagatcttttctgctttgtcttatgggcatttagtgctgtaaatttccctctccacactgctttgaatgtgtcccagagattctggtatgttgtgtctttgttctcattggtttcaaagaacatctttatttctaccttcatttcgtgatgtactcagtagtcactcaggagcaggttgttcagtttccatgtaattgagcggttttgagtgagtttcttaatcctcagttctagtttgattgcactgtggtctgagagacagtttcttctaatttctgttcttttacatttgctgaggagagctttacttccaactatgtggtcaattttggaataggtgtggtgtggttctgaaaagaatgtatattctgttgatttgggatggagagttctgtagatgtctattaggtccgcttgctgcagagctgagttcaattcctggatatccttgttaactttctgtctcgttgatctgtgtgatgttgacagtgggtttttaaagtctcccattattattgtgtgggagtctaaatctctttataggtctctaagggcttgctttatgaatctgggtgctcctgtattgggtgcatatatatttaggatagttagctcttcttgttgaattcatccctttaccatggtgtaatggccttctttgtcaaagagggaaatttctgtgtgacaggccctcagcagtgtctgctgtgtctatgttcttgtctttgcatatgtacctaatctcctttttgaatcattagttccttagttccttatcaagaaaggactaagccttgcagatttcaagtgctcaatcattatttgtatattgagtgaatgaatatgcactcacctacatgactgactgatgcattcaatactattgatcttctgtaatatgctaggaatgtgctgtgtgaggtacaaggaacatgggtcgggcagattattttatgccctagggaaggagacagatcagaactagtaaaccaacaaagcatatacaattaaaagttatgtaaatcttatttaggaaacatcaagaggcaaaacatagcaggcctcctcatttggagcggtcagagttaatgacgtttaagttaagatctgaaaagaaggacaggaggagggattcagcttgtaaggagtgggtgaagagagttcagagttctgaatcttgcaactatgtcttagagataatttgttttcaagaaccaatacaaaagaaacagtgacaaaaacgatgaaaggtgaggcttctacaaggccacaggatagcttactcatttgacaaaaggttagatggtgagcttcctgaagccttaggccaggaagtggttgaccctcaaaaactaaccagagtgggatgggtaaatggacaaacatatctctcagcatcccatcctaaagagcaggagactgtctcaggatcctcatagcctctcacctcttctgtctgcagactggcttctttgcatatccagccagctatggctacccgtgcaactccctgtgcctcattcaaggggatgatagagactaactgtattcctccttcctgggggaaagaatctgaatggtttgatgtaggtcaggcgcccacccttgccagagtcacctgtggcccagggcacaaggtctacctggttagctgccgtcttaattctacttaatcttgcttggcaggactgggagagactctctgggtaagtggagtacagggcaggcagctggattaatgcccctgttattaataaatgctgcttttcaagttcttcaactttaataacactggaagagtcccagtgatgtaaataacttagttaccacctggtttatttttgagtacttatacccgctacagggcattgtgtacagcagatgcttaagaagtagtgatggtgataataacaaaattgaatgtgaaatatgatgtagttctttcctaatggtgcaggttaattatattgttttaatgaaaatgcttctttgttttgtggataaaaatcttttttgtaaggttcagtctatgtctttatttttttctttaactcctgcattttgagaatcacagtctatatatttaaatcactttagaattactttattactattataaaagtaatgcatttgcattttagaatatttggaaaccagttcagctaagagaagaaaatagaaattgtgtataatcctacagcccagagatgactccaagtgacatttctgggtgtttttttcccagttagttctttatgtgggcatgtattttaagaaaatggcacatactgctttttccattcaacattatattgtgaacattaagaattatcctactgcatcctcatctcctgctgcagtgtgttctctcatgtggatagaaagtaccgaagtggatgtacagatttgaaaagcacctctgctgctgaatgggatccttaggctgggatggattggaatgctgaccctgaggtttgtgtagcagtatagatactgcctgactgacttcaggaagagcagtgtgattgtggaatttggtcagaaattaagttcgtatgatgatgatcacttgtgtctgcttggccactgctttcctgaggataatctgaatgaagctcattgactattttgcaaggaggttggctcagcttgagcatccctgtaaggaaaataatcagtgtctccctcagggttctgggaagcttctttgctgctcaggtcgaggtggcctctgcagtctgtgcttgcttctcctgataaagcaaattgcaagcatgccaaattgctttgctccggcttaaccctactccagaatgaatccataaatgctacaaaaggaaagcttatgaacatatgctacacagaacttagaaaatgtcctgcctacttaatccttttcctacttcgtgggggggaaaaagtctatttatacttgaactgagaattgagggatcacaaaagtgaagattggatgccgtgctagaaatcaccagttgtgttttctcatttcccttagagccacagattgatttttcaatacaactgtgtcagtagggaaatgtgccgttctttctagagttcttagattcactcctaagtatgtgaatgtgtctaactgccttttgagaaaatgtgagatcccttgtttaaacacagcgtgttcattagagtggattctgaggtctagaggccacctcttgaagtcactgcctctcaccttctctcatgactctacatttagatgcttgtagatggagaagggcacttctctgcttgtgtgttcttggacagattattccatggagagatgtgtggaatcacaatagatgtgagctagctcagagggttgggaacttgccctggcacttagaatgcatgctggcccttctggttcaagatgattcccctgcaaaatagttggtctttttccttgctggcatatttgttcacagacatccgcagaagctgttctggaaaactttctgaccctgaagcacctcaaaaattttgatcccgtgctccttgctgtgagtcatcccacactggagctctggaggactctctagcaggtcagctttggttggcttcagcctccccatctcaaggaagtcagtgcagttttcctgcctgtgtcttatttaatatatgtctgtatcctctggctgtcttggaatgggggtctaaggggccattcagtttgacaccagaggcactgtctgtgtatagccagtcataatgaataactgtaaacatgagtagatgcctgcccaaaggggatgttagccgagaggtgtgtgaatctgcttggaggggcaacagctgaaatgtcagagtagtttactatctcctgggtagagacactgggggaatattctctgtctgaaaaatattataggcatcaggtcccagatttctcttcctgtggctgcacgtgctcatctttctgatttagaaactagcgaagctccgtcagtattacaagtataggagattcagactgagaaagaagtaaaaaatggagggcgcttcaaaatggaaatgaattgtggtcatcaccaacccaggatacatttgagaaggagcatttatgaacaacagttgcccatgatgctttgcccattaatgccaccgagacctgctaacctgctccattttctttgtaaacgtgaaaaaccctgatgctggcaaacagggaagtcatgaggacagcagaatgaaagcatgtggtgtgacattgtggaccattattccattgatatttatcatggcattgtgatctggtccaaaaatgtagctggctttttggcttttgatatactacagtcacttttcttgaaatctctcatttaatctttatcacaattcatggggcagatattgttcttcaatatttaacaagtaagggaacagatgttcagagaggttaggtaagttgaccaagattgcacagtttgtaacaaggaggcattttaagagagagagtgcagcaaatcttttgatcaggcaaggggagaagaacctgtcatttctctgaaaaggcagcaggatgctaatgaatttgtgctgtgttccctgataactttagatgaggttgggataatttggggatataccttaggtaagcaggtgcttctttctgcaaagctgatctgttttcattcattcattcacttgtggttgattcattcagagtcacttactcgctttttctataaattgggcacttgttttgctgagagctaggtattaagagcaatagaaagatgatgagagaattgagaatctgattggagagaaggatacccagagagagctagaacataacggcactctgtggcaagtatggcaagaagcaacagaattcaggagcatgttccaggagtccttggagtgacctctactactgtgtctccccacattgggaatcccagttagtattccagaaatctgtatctcagcacagggactggcatttgttttgcactgtcagccacaatgaagagacctattaacagcatgtgatttctttgtgatggataatttgtgagctcagatgtggatgtctaaaagagatggtgcatagaagtagaagggccttcaaatcaaacagtacagaggacttcctctatgacacattcagggacagccccagatataaataatcatgaagtgggctactgtctgctcttttgtacccttacttctcatagcttgtgacatccaaccccaccccccataccccctatcctgaatacatgctccttcaggttctcagggccctgcctacctcttttggtggtccctcaacctttaatctcattaataggacaggatggaggggtgttgagaattctatcattcatttactctctagtatgaatttaaaccagtttgttacagtattccatgtggtacatgagatgagatgaatgaatacatttttggttagtcacatgaaatcttttcagtttccttctatttatggcaagtgatattggctatatacaatatgtataccagtgacattggatatttacagtggggatataaaattgtcttcttcaaaaaggtaatttagactggcagaattgagttgatttaaagagaaatgttgtattaatatagaacactggctcatagatattatacaaatcatgaaaggagtatgtaaataactgaacttttggaacagttgtgtcattttatctggttatgtaggcatttcatactttaaccgtggaatacaatgttttctatcctaataagagaatttaattgatcaaggtggggagagcatttctgaaatcctcttcagagatggccacctgcccatcaggactgtgattcacccatgttacccatgactcataccacaccaagctttctctttcagttaatggttacacttcagagaaagttatttccccttcagagtatccgatttcacatgactatggagcatgtagccccaggatcctttctcattaaatgcttatgttggcatggactaattctggttagagtatttaaaccagacttggtatgtccagtagccagaaagaatagtaacagtcatctaaccatacacttatagaacagaaatgtaatagaataaatagaatatttatttcatgtatgaaaaataatactagaatctattcctgaaccattttttctaagggataggaaaaattgtcaaaacaaagagagatttttctccaagaatagtaattaggctaggaaagagacatgttactgcaattataagtgggccctatgtggcaagattcaggggcttgctagcattagacgacttggactacatggtagatttttttggtctttgggtctgtctttaggcagagccaggagagggaacccagggaatatcagagcagcctgtgatgctggaattaaatgaaacttgttagtattctggacatgacaggccaggtgacatcctgggctctcttcagccctgtgattctggatgactgtttttttccccaccagttccataatatatttgtttgtgtgcttccttcaagtaccagaaggaacacccattcttagaggtctgttgtattgtcttttcctaaatacagtggagggatattactacacaaagttaatttttcatccttcttgtagatacaaatattgatgttttcacagtatatatttgtatatttatttgctatagcctcttgattgttgataatcaagagacaggaaaaatataatgttactattattgccattattggtcattacttggctgggattttatccagtttgggagctaaattcttctttccgttgacaaagaacaattaattgacttcagataatttaggcttctcatgtccccaatatgtgatttgtcaagctaagaatattactttaacttcattatgtttactttccttgtatttggtatgagtgagggaaaataatccaaacatttgaattccttgtctttattttttagtcgaaaaagcaacggagataaatgtacttgaaatgcatatatttaataaaaatattaaattgataatttaaaggaactcaggcctaaaatgattactatcattaactatgccccactccacataaagattgactggtaaagcaaatcattaagcagttcccatgctctttctataatttggctaggtgctgggcatatacatatatatctgttaacatcattgataaggtccctcccccatagttcttgtctagctttaaataaaagcagggcaattaaatcaattaatactttgcttggtacttttttgtgactgaatcaacttattttttgaggtagcatcagttttattcagacagctgcacaaacataacctcggtatttagtcttggaagacatgcaaaatacatttcaagtctgtgcttcctaaacacaaaactggagaagagagactgagttggaacccccatggtcttcacatttctcattcatggaaactgaaaacaaaactaggtctaacctaactattattgaatttatcgttgagagggaagaaaggaaaatctgcttagcatattatcttctgacttcctgtaaagtgaaataaacctaatcagtactggtgtttctaaaaacatatcaattgtttacattttaaacgcaattgttaatgagctgttattatgaaagttcaccacattgctctaaatcacttgctgagccagccatcagaggcttacatcccagcaaacattttctggaatttgcagggcacaattatgattgactacagatctcctcacactttcattacaagaattaatgtagtgaattgctatataaattgatgccgtgagggaaaggcacgctaagaggttttaacaagactgtcagtagctcaatagtttgtaaagtcaaacttctcagtgttttcagagtgcccaccctctttctcagtgtatcttttcttcttggtctagttagcaaactgaaagggagagaatggttgttttatgtcaattttctgtagaagcataacatgctataggatttgtatacttgtaaatccaagttgtacatcttgatgaattttcccaaagtcatcatgcctaaggaaccagcatctagaataagaggtagaacatgacactctgatgccatcttccactcactaccatgcttgcttccactgaggctgtcactatcttgactcatctgcgattggttttaccatgtttttgaatttgtgtgtgtttttgggtggttttttttttttttttttttttttttgagatagggtcttgctctgtcacccagactggagtgcagtggcacaattatagctcacagcagccttgacttcctgggctcaggtgatcctcccgtcttagcctcccaagtagctagggccacaggtatgcaccaccacacctggttaatttagttttttataagagacagagtctcattattgttgcccaggctggtcttgaacccctgccctcgagcaatcctctcaccttagccaccaaagtgttgggattacagatgtgggtcactgtgcctggactaattttatataataaatagaatcatacggtatgggcttctttgtgtgtggcatattttgctcaacattgtttgtgaaattcggaatgatctttttgtgtttaagaaataatgtaggcttggctgggcatggtggctcatgcctgtaatcccagcacttcgggaggccgaggtgggcagataacgaggttaggggatcaagaccattctggccaacatggtgaaaccccgtctctactaaaaatacaaaaattagccaggcatggtggcacatgtgtgtagtcccagctacttgggaggctgagacaggagaattgcttgaacaaggaggcagaggctgcagtgagccaagatcgcactgctgcattccatcctgggcaacagagtgagactctgtctcaaaaaaaaaaaaaaaaaaaagaaaaagaaaaagaaataatgtaggcttgtggatgtcaaacaaaatcacgtggtggacaaatactttggaaactttatagtgccttgcaaatctagccatggcatggctgactgagtaatctggggtgttttcatgttggggaaaaaattggtgtcattgaattattactgactgtcagccacaccatttgtttgtgcaaatttgacagtgatttataccagataactcatttatatcctaatagataaaatggtaagattttcagatactagggttccaaaggtcatcttagaaatgtactccctgaggtttattcttgtacaggttagtggacaattttttataattgactaattaaatggaggctagagtatatttgaacctaaggctatatcttaaggtttctacctttttctatttaattgcattaactgtgtgaattaacctataattacaacgtttttttcttcagtgtcacactatacataaaatttggcttacaggccagactacatactagattactatattctggaaggccacatacgtaatggttttcttgaaaataacacctcttatccccaatgcccaccacctcaccctgtcaaatccaaactaaccaccttctcagcaacacattgcagaggttaagagcatgaggtggcctctgttgggtgtgcaagtggattctttagccttgataagcctcccttccacctctgaaaatgagggtgagagtagcacctctcatcaaggttgttgggagtccagtaatggtttcattcaacagaatgaaacccagtgcctggcacaatctaaacactcaataactgccggttactattgttattatcattccattttataattacccctcttaacacatagggatttcgtgattaacgttaagcaggtggtcctaagaagaattctttcttaaactttaaatcaaaacaaaacttcctttgccatccttcaagtggcacagactcatttaaacaccatccagaccaatgggatgcatcactgatagatttttaatttttatttttacagaaggaaaaaaaacccagaaagtggtggtattttaatgctggagcaaacctggtatcattttttaatgtctatctgatgacaatctggttattaggttgtcagaattttttgacaaaatgtagtgttggactacctaattacattgcttcagagtccagtggggctgctgatctgttttctaataatttttggccggggttgttttgttaaaggcaaacgtatcagtcatgtgagataggtttgctttttatgtttactagtctaaacatgaaaaatccatttaggcctgctattgtggagagcagtaataatacaccattcttctcagaacccagatgtcccattcatctgaaagttttaagtcactggggagaaatgtcagagagccaaaagttctgcaggttctattttattttatattttggtattggaaaatacataatgaaatcagcattcttaaaaatatacatttaaagtaactttttactaccctctccccaacctttattttttatttttaaagatcaggagtttttttatagattgaaaacttgcgcagtggagagtataaactaagaagtatttttacatgccttcccttgtatcaggcagactcaggtttagtggagttggaagctcatacaatttgggaggtcctctttaagaaaaagaggaaaagattatgaatacaaaattagatgcaaaggtgagtatttatttcaaaatgattcagtgaaatgatttggttctctttctttttcttttttttttttttgagatggagtcttactctgtcgcccaggctgaagtgcaggggtgcaatctcggctcactgcaagctccgcctcccaggttcacaccattctcctgcctcagcctcccaagtagctgggactacaggcgcccgccgccatgcctggctaatttattttgtatttttagtagagacggggtttcaccgtgttagccaggatggtctcgatctccttacctcgtgatctgcccgcctcggcctcccaaagttctggggttacaggcgtgagccaccacgcccggccggttccctttctttcaagatctctttgccacaaatgcttacagagaaatgcctcttcatgtttcctctcagctagaacacggactcccaaggactcttggcactctgagggcccatgcaacagggaccctgaagtttaagcttcatcagcatcatgtcagttcttctctgtctctttgaatatgctgctgaatcagtgagaatataactggttagatggcatctggaaagctggagaagacgtttagttggaattagctgtgaaattgagtttcaggttaacctcgaggtggatattgcaaattcttaagtgaattgggagaataaaaaaagctttataaagtataaagctttaaaaatggttatcaaaaagtagaataattccaggatacataacttctctgcataagttgttgcagtgaaagattcattagaaaaatgtaacaataaaaagaagaggtattgatgttttccagaaagctgtatttcttgaggtgtttaattttttgtgtgtctcacacagcaagtttcctggtggcagaacaacatctagccttgacatgtggtgtaaatctttatgctctcttcagaataaaatgattgcagcacttttctactatcagtggggcatgaattgctgatatgttatttgatggatccaagcatatcagttgtctttgtcaccaagagcctcaatggctcaaactctggagatagttattcaaggaagagtttcagtacttggccatgggatgccccacaacccagagaaacctgaaacccacgtcagcctttcgattctgtatgttcatcagttatctatttacttattgccactttgttgaatgctctgagatactgatgtttgtcaattacgatttgcttatgcaaagatgagaaaagatcttggctactgctttatctgtctacttccaaggcatgtcaaaagcccactagttttggaacttagattagttatccattgtcttaagctgtttgtgctgctgtagcaaaatatcacagacttggtcatttgtaaaccacagaaatttgtcacagttctggaggctgagaagtccaagatcaatgcaccagtaggactggtgtctgttgagggctgctctctaattccaagatggtgctttgttgctgcatcctctggagggaagtacaccatgtcctcacatggcaggagggacacatgggcaagagagtactccttttgacctcaagcccttttataagggtgctaatcccagtcatgagagcctcgccctcatgacttaatcgctacccaagggccacatctcccaatactgttgcactggggcttaagtttcaacaatttaattaattattaattaattaaatttaagtttggaagggacaccatcattcaaaccatagcacctatgttgtaaggtcaagctgagttgatagtatatgtcatgtgttcactatttaatgaagactttcctagagctcagtctggtgactttgatgggggaggtggtcaagctggcatctgggtggaagatggatgttgaaagtggcagaaatggacaaagggattttaggagagtttgtggtggctcgggagtatattttacctatctggtatttcttcaggagagaatacaggtttaaattacttgaactactgttaattatttttggttgcttatttttgttgttttttgttattgttttttaaatgtgtgctttgtgtgacaaactgtgaggtatttatatgcatttctgcttttttttcccttctgccacaataagagcatgtaaaccttacctttgtcatgttctttattcttttcttaacctttcgtgagggtttcgcagacgtcctgttaggatccaggtcttctcttcatttaatagatgaggaaatgcaaacataggaagatgtgctttgtggtttcctcgagatcattgcatgccattcaccatgactggaacccagctgactgactcccatctctaaagttctagaaaggctgatgaataggacagtttggataatggtaccctcacaagtatcccattgcaagtatgtattgtatagaattgcatggtgacatcttaattgcccatttaatttatgtagctacaacattttcaaggcatttgaaatatcagaatagcctgagaaatgtgtacaaataatctgctgaaattaataagtggaaaagatttaaagatatactagtgtcttaacaacaattgaagacacagattggcctggctatagcatgtgaaaaatacctttcttacagaaaatacatgctgaatcaagcattttcatttggaagttaatcaacagttgggccataaagatggaatcatgaggtcccccccgcccagagtaaactctgaatagatcaaatttgccaacgcagatgaaccatacagattttgaaatcctttcctgatgctttatatttaatgacatgcctatttatttagaaatttaaaatgattatgcttactcacataaattatatctgtaattaaatgtctctttcctcagcattgcagtataattgttttatcatggtggttcttggttttgagactctgtaagaattgtcagttgttgcatttactttagaccataagcaatggatgcagattttatatgtagtgcaagatcttgagtttcctaatcagtttttatgttacttaagcagaatagaaagcatagccatatgtaaaaactgagtccatgtactatagggggaagatgtatgttggtacctttctaacacctgcagtttccattatccctcttctgcagccaggctttagtagtgggatcctcccacactccccttaatatgagtatcatggggtccttacataagttcccaattactgcaggtcaagattcaatcaaaagagttcttttttcaattgcagttcacttaaataaagtaatctcacattcaaagtccagagtactgcagagggcatagagtgataacaaacaggatgacaagttagaagggacatgctggctgggatgactcagtaggtactgggctttaagcaaagagtagtgaagatttgatattcagactgctgttaagatgtgtgtataaagctacttctccttaatctggctgggtgcccaaacctcctgctagaagagtcacttttaagtgttaaatttatccctcaattttcttttttataacctaacagtctctttaggttctcacaaagtagagtggtaggaaatttgtatttttttctatgaaactttcttccgctgaaagcttgttggaaaatgagaactatgttttgcaaataacccccagagttttgatggactgtatatgtatattctgtgaaatacagtgaaatgctatccttcagagatacctcacagttcataccaccaaagacatcgaaagcattctaacaataataaataccacaggtctttagaaacaacacacacacatacaatgaggttatttttagttcttaggcaagcacagtgactgtcaaataaattatacagcacattttggagtgatagattagtaaattgtcgaatctccaaaatatagctgtttgagttttttaaaaagagattttttttttcttttcagcagctccaatgagaaaataacaaaaagagaaatgttcatggttccacacacgaaagatgacaggatggattatgaacttctaggttacatctagctgcacatgtattttatttggtctgtaaactgtttttaaaaaattaaaatattaacatttttaaatcaaggtatttaaaataaatttagcagcttctgacatccctgggaagacatggcaacatctggccctgtctcctccatggtagtatttccttggagcagaatagttgctgccctgtttcattgcaggtggaggggtaaaggctcactttgttttggctaggcctgctttactcgtttaggatacctgcctgcccctgctggccattctgacccctgactaaggaaaaccacaatagccttctgcaaatgtgttcacagctgagacaggaagaggcttagtttgtgttgcagagagaactggcatcagtgggggctctcaggggttgtgtgggggcagtgaggagcattctaggcacgtggatttaagctccagtgtcagtgaattttagacacaacttctcagatctgtaactcacagaaagtgtttggacatagtcacataaccatctatgagggaaaatgaagaagggattcctttattatcttagtaactgtattttatctactttttaggaattcttcaatgcttagattaaaatattgttttaattggataatactatcacataattcaaaagatgttaaaagatgcacagtgggatgtcagtctccttccatttctgtccctcgtgcctcagctcccctctgggcagtaaccattgtgtgtctttcttgtgtgtcattccagagatgttctatgcatatgcacacttatgtccttttccttacatgaataataagtcattatatatgctgtgctgcccttgcatttttccccttgcatattttaagctaagtttacattagagatcactgcatcttggtacatgaaaaatgaccttgttatttttaatgtctttatatatgctcttgcatagttgtgtcatggtttatttaaccattactgtattgagtacatatactatatatataattgagattgttttctgtcttccagtgataaaattctatgtattcacaattttcttctttctgcaccctctcctttttccccatgactttgattttgctcacaaaacaaaatgattgacatgaaactttaggtccacccctaggcaaaaaatgcagcaactttggtcacaacaaaatttcttttcccccgtccatctctatcagcaaaaccactacgtttagtttcataaaaaagagatgaataagggaatatgctaaaaattctggcagtagttatgttttcacacacttctggatccatggttttcaaactttcatgtacataagaattttctggggatcttggtacaatgtagattcagcaggtggggcctgagggtctgcatttataacaagtgccaggtgatgcccagattgctgggttgggccaccacactttgagtaaaaagacttgtggaaatttgttgccatttcattttaatgtagtgagtggtgatgtttagatttcacaaatacccataatcatcctgtttcacaggctgggagtagtgaggttggtggccaatagtggtgtcttttgcttatatgaaagttgaataaatagtctatgtttagtttctgttttagtgtattttataaaatccttgatttaggtgtgtgatacactttagttggtatattttcaaattaatattttagtctataaattaagattatagagataatgaaagagcttctgcataacaaaaggaactatcagcagactaaacagacaacctatagaatggaagaacatttttgcgaactatgcatttgacagaagtctaatatccagcatctataaggaacttaacaaatttacaaggaaaaaatgaaccccataaaaaagtgggcaaaggacttgatagacacttttcaaaagaagacatacatgcggccaaaaatcgtgtgcaaaaaagctcaacatcactgatcattagagaaatgcaaatcaacaccgcaatgagataccatctcacaccagtcagaatggctactattaacaagctaaaaaagtaacagacgctagtgaggttgtggagaaaaaagaatgtttatacacctttggtgggagtgtaaattagttcaaccattatggaagatagtgtagtgattcctcaaagacctaaagacagaaatatcatttggtccagtaatctgataatcccattggtattttttgggtatataataccaatgggatttttttgggtatctaataccagtgggattatggaaaaatcttggctatatacctgaaggagtataaatcattgtgttataaacacacatgcatgcatatgttcattgcaacactattcacaatagcaaagatatggaatcaacctaaatgcctatcaatgatagactgggtaaagaaaaggtggtacatatacaccattaaatactatgcagccaaaaaaagaacaagatcatgtcctttgcaggaacacggatggagatggaggccattatccttagcaaactaacacatgaacagaaaaccaaatgctgcatattctcatttataagtgggagcaaaatgatgagaacacatggacacatagaggggaacaacacacactagggcctattggagggtgggagagaggagggagaggatcaggaaaaataactaatgggtactaggtttaacatgtgggtaatgaaataatctgtacaacaaaccctcatgacacatgtttacctctgtaacaagcctgcatatgtacccctgaagttaaaataaaggttaaaataaagattacagagatagaaataactttaacttctcattttatttgttttctttaaagagattatttacatatagattcatatgggaataaaatttaattgcaaagtaaaaccaaggtaatttgaccaggttgtggtgacttaattatctcttttcagtggattgtaaattccttgaggacaagatttattgaattgaattgtccttttataaatttgctattacctatgatgaagattttctccttgcccaaactttaattatactcctctgagcccttttctcaactagcgaccttggccccagacctcattcctgtatttgatctttctagcctggctttagcaataatctttttaagtgatagctggtcaccgtgatgtctaatcaagtttctcaccccacccttgatgtctaagtcattggcctgcctttagcaagaatcctgttaggaattaatttagcaagaattcccttactcctcttagtagttttctacccactgaaccccttatctgctctaacactggctataaatccctgactatctatctttgttgtatttggagttgaacctgatctctctcccctgttgcaatactgctattgcaatagtccttaataaagtcttccttaccattttaacacatgtcagaataatttttgtttaacatttgtttcttgcccctctgcacaatttttgtcttgtatcattttaaaagcaataaaagggaacaaagaagttcacttctcatcacatttcatttttctatatgatttaaactaacttaatattacttccaactaaattcatattaaaggtgaaatcactcaaaatttaaagtttttaaagatagattttgaaataaatctgaattcttactaatcttttgggtcattaaaatataattttcagtaaaaggtaaagttatgactcatataggtataaaaatgaacacatgctaaagattttattttacttatatgatttgagagaaccaggcagatgttataactggctcaaaggaaaagtcaaaatggcacaaatttatatggactaaaagagagttaagatgagttgcaaattgagataaaactgttttctccacagtaggaagtcaattaaaatcacagcctgtaagacagaatttatatatatctatcagttatctacaacttacgaagtggtgcaaaatagctcaaagacattgtacaaggctagagtcagacagctggaaagagtgtgtttatagatgatgtgtaggttttcgttgaaatgtaataatttttttccttcaaggtggaggccatctttgacttaggtgtacgccctaagtattgacttagaatttaactttgaaaagtacaaaataacccactaattggggatgaccacacacaagtaaatggcaaagacatagagatcaatatgtgtgctacaaaacatgggaaaaactagggacattttataacacatagcttctggctttcaaccttgtagcctgaagactgaaaagaaaaagaaatacctttccctgtactggcaaatttgagcttcatggtgtgagttaactatccgcccagatcaggttgtttgtaagaattcattttcataattgagcgtatgcacttgaaccagaaaatatttagagaagacaatatagtgggaaatcaacaaaaacagcttgaaaccgtgccttgaactaaattcgcattcttcagaaaccaagttgagccagtgaatgcaggagtggagacattgtgtggcctccattctgagagtgctggtgggaacacagcattgctcaagttaagacgtgataaatccctgtcacaaggttgacttgggtcttcctcactgggacacagggccagaaaaatgaaaccttcaggtgaaattgagaaagttgtgcctcaggcaactgccattaggttaaattctttcaggtgcattttatagccattttttgcatacttttgtcactcatttttgaagtcacatttctgagagtgtttgttacttttatttctatggatccttttctctacctcaggggttagcaaacttcttttgtaaagggccagacagtaagtattttaggccttgggaccctactgattctttcacaactgctcaacaccatcttgcaatttgaaagcagctctagacagtaggtaaatgtggctgtgtaccaatggcattttatttattggtatggaaatctgagttttataaaactttcatgtgtcatgaaacataattcttttgaattttttcagtgcttttaaaatgtaaaaatcattcttaatttgtggtggtatcaagaggctgctgtccaagtctggccctgtgggctgtggtgtgccaattcttgctttatagaatggatgggatatagttactggatatagatcagatttttatgttgtggttttgtcacttaccagctgagagatcttggacaaataatctcacctcactgaaattgggtttcctttgttgtaaaatgtggatgatccctaaatacagagttgttttatggactaaataaattatgccaaaaccctgtgcttgggcctccaaaaacattgaataactgttttctttctccctgttcctttccacctcttggtaccttcttttcttttttcttttcttttcctttcctttcctgtcctgtcctttcttttccttttcttttattctcttttctcttttcttttctttcttttttttttttttttttgagacacagtttcactctgctgcccaggctggagtgcagtggtgcagtctcagctcactgcaacctctgcctcccaggttcaagtgattctcctgcctcagccttccaagtatctgggactacaggcacatgcccgactaatttttgtatttttagtagagatggagttttgccatgttggccaggctggtctcgaactcctgacctcaattgatctgcccgcctcagcctccctaagtgttgggattacaggcatgagccacagcacccagccccgtatttcttttaacgtctgtatatgcaagtttttggcagtagctgtttcattttgttattaattgaatttttataaatggcatccaacttttatatttatattaaatatagtatatatttaatagggatataaatataaaatgtatttgtattaggaaagtgctcaagaaaaatcctgtatcgaattctcatgttaaagtagataatccgtttctaaatcacccattctgtcaactcatatttccacttaccggattttcacattagattttctgtgtcaagatatgcttgtttgtgtttttatctgaagagtgagaagtggaccttggaccaccctgtctggagtcattccctgggcttctccagcccctgaagaaaatgtgagtgactacttcatcattttacctgttgaggctttgcaatggcacttactctaacctgtggctattttcttttatttgttgatttttttattgccagactccctcacacttccaggatggaaagcaccacacctgtcttacttaagacaccacacctgtgtgcccattgcctcacatagtgcctagcaatgagtaggtgctttatgaacactcagtgctagaatgaatggacaacatttatgaaagtgactgtattttggaagcaggaaagacgatctgcagttttctgtgttacaagtggatatttggaaagttggtttttagaaagattggtgttgaacagatttgagttaatcttgaactgtgtgtattaaaaatcaaacaaacatacagcagaagggaccaattattgctaataaggaaggtgttaaaaaaatacagcctgcttctgtaaatgtgaggtttgtaagtagagacaataagaaccacattccaggatccaagaagaactctaaaggatgtcaggtctattttactctacagtgtgtctggtgagtgtttgtttccttggcaaggtggtataatgaaaacagaagtatagacgaggagtagagaagaaagcactaggtttggaatcaaaatacctggattcaagtctggctcttcagatgactgtgaggactggcaatgtgactttgggcaagtccactaacttctctgaattaaataactactctcaggttgtttgtgaagatcagatagcatgtgtgctaagtgcttgtgtaacctcttaaattctgtacctatctaagttagtatattttagtataaatgactgacaaaaaacggtggcatcagctagaagacagtaatggtgcacaaatttggattcctcctgcccaattcctaagagccctatgcacgctttgctgatgtatgaggcaaaaggacaacagtttcttccaaccctgggttccaggccttaagaatctagacaaggtgatggtaatggtgatgatggtgctgctgctgctgctactgacatgaatgataaattcaatagcagctattatttcattagtatccattctttgtcaaccaattttctctctcttcttctttctttctctttttttttcagagtctcactcttgtcacccaggctggagtgcaatggctcgatctcagctcactgcaacctctgactcctgggttcaagatattctcctgcctcagtctcccgagtagctggtattacaggcatgcgccaccacacctggctaatttttgtatttttagtagagacagagattcaccatgttggccaggctggtcttgaactgctgaccttgggtgatctgtccacctcagcctcccaaagtgctgggattacaggtatgagccactgtgcccagcctgtcagtcaattttctaggcaatttatagacattactcaaaattttttgaacaggcaaaaaacaagtaactctattaaaagatgggcaaaagatatgaacagacacttcccaaaagaagacatacaagtggccaacaaacatatgagaaaatgctcatcatcactaatcatcagagaaatgcaaatcaaaaccacagtgagataccatctcacactgtcagaatggctattattaaaaagtctaaaaacaacacatgttggtgaggctgtggggaaaaaggatgcttataaactgttgtcgagaatgtaaattaggtcagccactgtggaaagcagtttggagatttctcaaagaacttaaaacaggactactattcaacctagcaatcacattactgaggatatatgcaaaagaaaacaaatcattttatcaaaaagacacatgcatgtatatgttcatgcagcactattcacaatagcaaagacatggaatcaacctaggtgcctatgaatggtggattggatatagaaaatgtggtacatatataccatggaatacaatacagtcataaaaaaagaacaaaagcatgtcctttgtggcaacatggatgcaactggaggccattatcctaagtgcattaatgcaggaacagaaaaccaaatgttcttacttgtaagtgggagctaaatgttgggtactcatagacataaagatggcaacaattgatactggggactactggaggagtgagtgagggagggaagcaagggttgaaaagctaactgttgagtactattctcagtacctggatgacaggatcatttgtactccaaacctcagcatcatacaatatactcaggtaacaaacttgcctatataccccctgaatctaaaataaaagttgaaacaaaaaaaaaaattcttaccacatttctgtgggatagtttttgttgttattatccccatttttcctcataagtaaactcaggcttagagaacttaaataacttgctcagtgtttcacagctatttacagtggagtctggtgattccatctttgttgaggcccatctttgttctatgccaatgagtctctaacaagcatcagtttcacctgaagcgattgttgatacctagatggctggtccctcttccagagtttctgatttcatcagtaggtctgagatgaggcctgagagtttccaagaggtactgctggtctgggaaccacactttgagaagccttcttctataccatgctttttgtgctttgcctttgttcaggttcaaaatacccagaaatcctaggttcttttggattttaggactctttggagaagatgagaggactttcagagactttatatttttatctaggtcttttctagaatctggaataccattggaccttgtagtaggtgatcgatctccatggtttttcaaatcagtaacacttacatcaaaatgcagtctctccttttccttctcctttggtcagctttggtctagatctgtttttctgatttataataggaatattcatagcccaatttgttcactgatccatggatctactgtgttgctgatgtacgcaactgcaagggagaagaaaatatttttcttttccattgccaggttaatggctgaggcccctataacaaaagaaagattaataagagaaagggacataaatttatttagtataagttttatgtgacatggagaaaggaagactcaaagaaacagggaaacttgtatatttttatgctaaatttgatgaagagcagacagttgtgtagaagtatgattggacatagggggtgtgatctaaagataataaactggggggaacttagcaagccttctttattcagatttttctctttatctctgtgccttcagagataatgacattcctttcctccaggcataggaagggtgcctcttgaataaggcctatgacccactttagaggaaggctagagatttcttttatggcctgcttcaggggaaaagtgtgggagaaggtcagagagactttcctgcttccactgttttgtcaaatgccgacatgccatattttggggtagtgtgtcaagaaccccatcacaacaaatattgtttcagccttctgtgtgccagacacctaactgggtgcaatggtatgtaaaaccggatatggtccctaccatcagcgagcattattctagtgaggaaaagagacattagtcagaaaatccagacagataaatgtcaatggtgttaagtgcaagaactataacagggagatctaaacttcttggcagagaggaggggtagttaggcaatgcttgtttatggaggctataattgtgcccaaatctgagtgaagattaggaattaactaggtccagaagctggagtggggaggagggaagaacattccaggctgggaaatggcatgtgcagagagtgtgagagacaggagtacagcacagtcctacaagtgaagtctcgaaattgatagccttagtccaagatctatacatgtattaaagaataattctcaaataaaggtgaaatcatgactctcatactgatataaaatgaaaacatgttaaagattaggtcaacttataatgagagaaccagccaaatattataactagtctaaagagaatccaaaaagcccagacacatttatatatcaggaatactgaaaagaatgttacaaatggagggcaaaactggtttctgagggtggggtagggggattaattgaacctccagagaacagaacacaatttgcttgcctataggcaagaattattttgcattgttatcatttatctataatttacagagttgaaaattagtcctcatagaatcagaatctgataatatggtaattgggaaatgggatcctttatattctagatgaagcaaagttttatactgaagcacaatttttttcctgcaaatgcttgaatcataatatatgtttatggtttagagctagttggatttggttttaagggcttgatagcatagatgttaccccaagaagtatggggtggaattcactgctaaaccatttatacactaccttgagtatgatccaccatgttgagtaaaatatccagctggccataccttggtacttccctttaaacacaagtttaacagatggcctatgactacctttttccttctcctggtaggaagcaagaaaaaaacctgagaagaagcaatcagaaagtcagactagaacttggctttcattcaggagcccctcttagaacaaagaggggctttccagtgaatctgaaaaccaaagtggtttgccaaggtgaggtgtgccacagactccagagggtttacaacagagaaaaaaatttcttcaagtgtgtcaggtagagtcttaactaaaagaaggataatcatttggtcaattaacaggatgactgttgctgatgagttttaattgatgatttgctttgttgaaatgttaaaccagcgttgacaggtactacaactctttaactggcactcccactcaggagtcatgtgttaaacacttacctaatatttgagagaatcaaaaaatcatcccgttttttctcttgtaaactggatgtgttcagtgtagacaccttgttttccatatcagggtcgtattgtacaaggagacagaattagaatggcacttttaattctatttgtagcaagttagagttccaaatggcaatttcacgactgtttgataaaaaatgtcactggttttgattgagttgtgttattaacctctagctagagagtctttttatttttattttttgatttagtgcaaatgtgtctgacttctcagtaatgcatgctgtctcttgtttctgctagagaacgctggccagtagaataatgcatttcattggctggttcagtgcaaagactttaaataaagaaatggcaagataagaaagttgcctataggcgatagcagtgctgatgtttttttcttctccaaatgtagtacaagatattaaaactgtctcttaaaaatagcaatttgtggctgggtgcagtggctcatgcctgtaatcccagcactttgggaggccaaggtgggcggatcacgaaatcaggagatcgagaccatcctggctaacatggtgaaacccccgtctctactaaaaatacaaaaaatgagccgggcgtggtggcatgcacctgtagtcccagctacctgggaggctgaggcaagagaatcacttggatctggaggtggaggttgcagtgagccgagattgcgccactgcactccagcctgggcgacaaagcaaacctccatctaaaaaaaaaaaaagcaatttgttttcttctgctctaatcatgggtgaaagtgctgtgaaatctgtatcttttttttttttttttaactgtggatgattcagttaaaaggaaaaagttaaaaaataaaaaatcccaacccagcaaaagcaggcttactgtttgctaaatcaggcctctaatagtaaacagctcaaaaagccttccataatatttatgaacaatttctcaattttatacccagatatttctattacactctgcaaaggagataatctgagctgaacaaaagagaagagccttttttagattgaatagactggacaattcagtagcaaagtgcgtgattaccaatctttcaagcaaagcttttatgtaaggcaactttataacttcatccattccaaagagaaatgcattaaagaccatagggaaaataaaaggcaaaagagaaatgtagagaaatagcccattctttacatctctatagccacttgtttcatggctatcctcactgagttaacccaatttaaagccacagtgtaactttaaaaaaggcatttcactgttccccatggtagtcagtctacacaaataatgagaggacatgactaccattatttttcttccttctgttgttttaaaatatacttatctcttccactgtatgttcctgtgttttattgcatgggaaaaggtaataagtgtcatcaataacagccatcttaacatgctgcaggaactgtcaagtaacagtgattattgtaaaaaacgagctttctaatttccttgtcgcttacagagtaatctaagtgaaaatttccaacgtcctatctttacaaagaaacaaatacatttattttttcctctaatggaagaacttatgtacatgattcctacttgatggtagatcatggcacgtttttcaaagcttgggtctctcaccattgcctcagaatcacatgaggcacttgtaaaaagtgcagatatctgagttctcttccagagtgatgaaatctgattcttggggctaaggaggtgggggtgggggtgttggagaggaatgtgtagttttctcaaattctccagctaaattattagcacatttgaagtctgaacattgctttatgggaatgaaaagcctggtgattgtaataaactgttgaatgtgatatagaaagaaaatatgcagtagttgtggcagatgttgtatattctttatctcatactttccttcattccctagtgtcaaaaactcaaggcacagtctttttaacttggcatcaaagttctcaggtaccgatcctcacagaaagaggcatgtgcacataggcatcccattttgcacatgatttcagggggctgatgaccccaaagagcctgacttaagaaaaggaattctatagatgaaaacaaatgctgaattagggaaaatgagaactagtaaatttgacttaagttggtatcctactgctaattccaagtcaaaacaaacaaaccaaaaattgaaatattactctaatcacagacttcatattatagacagaagaaatcatgtcttatattgtgtacaagtattgagaattagcaaagtaaacatttaataatgttaaatgaattcatccccttgaaatccatccatggactttgatggctgctccttgtatccaggaacttttcaactaatgggattattttaaggggaaggggatgtgaagacaccaagtgggcaaggaagaaacatggcatgtgtatccaggccgcccctacagttgagtcttctgtgcactgaatgaagatgcatatctgaggtgtgggtgggggttgaaatgcagcttgtgcaccctattgtgggacttcgtctctgcagggaggggaacttttataatttgccttttatttacagattgtatcaaacgcacacctaacatattctacctattttcagccatgagacaggctaagttcctgaatgttctctctcattggataaaaaactccatggataccagatagaaaatgttagtcctattgatctcaaatagcattactttggatcatatgggaggtgaccaaaattatttttaaattatttattagaataaactacaagtcaggactgcaccaaagctagagagaaattaagtatttgttagaataagctattttttccccactaatggtaacaatttaatattgggcaatcacatttcagtctaaaaaaattagcagcagtgctggattttggtctaatatcatgggacttttcccagtctacatgtaaatcatcccacctttgttgcagcagtggagaagggcttgtcactaggtcttctaatggactgctagagtttaattatatgttgttttatggtgtctggcaatgtgattcccctgcctgacatagtttatgagctttttaaaaataaagatcatgtgactttgtgttctcatttgctaaaaagcattcattctttgggttcttgtagatcctattgctgtagtgaacttggacctggtgttgttattttgtaaaaatgtcctcaaaatcaaatgtcactgaatataaagacagttctaattaattaatgcaatggaaaaggtaaaaggagggagcatgtgaggactctgccaggtgctctggcctttctgtcagagatgaaaccatattcgtaatgtgaagtaggggtacaaggactgcctccattaaagagcaagagatgaaatgcccatgtgagtgcagcactgtacatttagttagacaaatctccctttaatttacagcttcctagagagagttatattctgcttctggtggcctgcggttttatttggttaccaattatggaagctagttgtgtttcaggaagccctctgaaaggtgtgcatagacaataaatcctgtgccttgctagacgtattgatggttctgttgatgagaggttgcacaaagtcaatagttgattctactgcgtggtgacatttgcatttaataaaaagtcttgtttattgtagcttctgtataaacacaactggcacctactgtgtcacagtggaaaatgctaagtagaaaagaaaatgtatggctgagaaggaaacgtaaatatgaatgattattgttattttttgtttgttttaaaataatgtggacctcaggtcacagaggtagattaattataagtttggttcatgactcactgtcatccatggtaaattctgttttattttataatatttatttcataatataacaggcataaacccaacaagtaaatattaccaataacttacaaatttgtgcccccttttatcccatctctacctcttcgtaagaggtaaccaactactaacctcatgttcatcattccctgtcctttttaagttttatatgtactcctatcaatagccatttagttaaatttttaaattttcttctatgaatggtgctgctatgaatgttcttatacacatttcctggtacatatgtgagaaagtaaaacatggctctactggcaactagaacataaacaatactcagaacaaggcataaacaaagccattctgtgaccctacaaatgactaaacacccctttcttctgactatcactgtctttctcagagtgactgctgcttctgggcaaacttcagtttgtttcaattccccaaaccctagaggaagccactgataattcccctttactaagatgctcccaaggttcctctggggtactttctcctttgctacagtaaggtgaaccacttaactttgactaccagggtgttcctggtggcctttcactgatggagtttgacatatgtgctcaagtttctcttgggtattaatatatactcagaagtgaatttgcaggatggtagattatatgaaaacgcaaagcttataatctttaaaaatcttgccaatccccattcaagtgtgtctcatcacatcttactttcatccaccatgaaaaaaataatctacttgacccatttctgcgcacacattaaatgtgcaagacaatctgtatatatatatagatgtatcccttacaacatatggacaactcacttcttttctttaaaggaatatatgtttattctctctgttgtcgtatggtattttcagtagttgaatatgcttagcaaaatttatgtttagtctgtggtttatttatctttttaaaaattcaggtgaagaatcatatccatgaggttttctttaattatagctgccttttcattttttgagtgacccaaaacagtggttttccaaactttagtaggcatgtaagaatcatctcaagagtctgtatttgcaggagaatctctagaggattgtaaggtggaaagagggtcctataatgtgatgcaaatagatgaattagtcaccagtgtcaagaggaaagcccccttgcagagtcatgctttgtctcacctaaaaggtgaagcattggcatgatgttgctaattacagaaagatgttaatgaagtggatattaaactgaactgggacacagtatagattataccataagtgagtggtatttggtgaatgaatgagtgtaatgcaagggaaattatataaactttacctcttaaacttggaggaggggtatggtattttcttgaatctatttaaaattttaaatgtataccatgtgtaccatgctaggtatacatggcaaaccaaacagacaaaattcctgtctcagggactttgggttcttggtggagagatagaccacaaacaaatgatttcaacattatttagggaccgtttcgataaatgttatgaagaggaagttcagggtgctgtgagaatggataaccggggcctcccttagtttggcatctccccaaggtcaccaatgtttctgtgaaaaagtgaggtttaagtagacttaaaaaatggtaggtatatgagttaggggttccaagaccattaccaggttcaatgatttgctaggaatactcacaggactcaacatatagttgtacttgcagccatgatttattacagcaggataaaaagcaaaatcagcaaagggaaaaagcgtatggggtgaacttcagaggaaacttgatgcaaggttctgagagacctctttgagtggagtcacataggacatgcctaattccttcagcaatgagttgtgacaacacatgtgaaatgttgtccaacagagaagcttgttagggcatcagcacccaaggctgttattgggggctggtcacgtagatactctctggctagcacataccaacattttagactcccagaaggaaagcaggcatttagcatttcattatttgaacaaacagttcgggcacagtgagccactcttatcagttctgggaatgatggcaaccttcccaaatccatgttcccagatgccagccaagagtcaactttgcaagcaggtctatttctcttatgtctcttttatcatcataaagtgaagtctgtagatattacctacctacctgcaaacttttttaaattctaaaaatagcaacctcaggccttctatggtaactcttttctgcacagcataatcactgacaaaagtaggaatgaagtagcatgctgtcttagtcttgctttaaaatatttcaacgaagaagaaaaaaaggagaagatgaatgaagcaaatgtgggaaaatcttgatcattgttcaacctgggtggataggtacttggagcttcattatactggtctctcattttatttgaaaacttttataataaaaaggaaaaaaaagaaacaagaaagaatagtaggtgttgactaggcatggagagggctagagtttgtttatttctgttctatttgattcagtttaattaaaaaaattaatctacctccttcagtttaattcaatcaattattatttagcatctgtttttttagggctgtagcaaagtcctgtgaaagttacaaaggtcagcaccacattgaatctctgtgtctgcgggctcatccatgaaatgggtgtgctcataagttcccctctcttatgaggggactttgaatatccaaagaattgttggaaagtgaaagaaaccagctgctccaagtttcattagcagccatgaatgttataataaatgtagattgctgccttggggaggcatgagattctcttactggcttggaagaatattcaatgaggcagaaccttcctgaagagagcggaaatgatggcagggatattgcctgggagtattgcctttggcagtgccttggcaggggaagagggcctgtcgggtcctccctttgagggggtgagatgatgtgaactagcttttatttaaaagggaatagataagctattgaattggagcgcatctgagggctttatttgaaaatgctttcaaaagctgttttgacaagaacagggaggaggcagtggtatcattaaataagctggcaacttttgtaaccagcattttggttttccacctcaagggagagtcaataaactttgattcccagcattaatgtaattattttgatttttctggctcattccagggaaggctgcagagctgcaatatcagatggccgaaagcaatgcagaaatcccatgtccccaaggacacgcgctgccgttcagaagtagcaggagagggggtggaataaatcatttcctctgatcttgttagtgttgagaatattttagggggtagcaaatgcattgcaggtctaataccagaaggctactgcaggcagaaggaaaaaaaataacaaaatttctctgtttttcctttaaatatgatttcctctttatatatttttaaaattgttttatgaggggtttttcccccctttctgattctgcaggttcttccttctacattatcatgttttctgtcatccagggattcttcctgatactgcccctggcagctgtaatatacttaatgtcaattgttactccagtaatatgttcggttcatttagtgtaaatggtcctatcattctgggaggtttccctgagccaagtgagaaatggctttcatgaatatccaggcttgcatggctagaggaatctgccacgtgcgagcctggtaattattttttctttctagaaaatatactgtatttaatttttaaaatgccagcgatttggggttttttaagacaatgggcagttgtggaaagaatagagcagttgaaatttcttcaagttgggagcagaggcacagaatgtattcatcttgaggagttaaactttgatgtgaggagatatacatagttgcaaactgtgttttttcccttgtcccctaagaaataaaattaaaaggtgatatgtatgtgtttacatatttcattttttacaaaataatatcaagacttgctaacaataatttaaggctgggcccctcttactgtaaattgtaaacatacctcgaggcctaggctatggacattggctataaatcaccattttcataataacagcaacaacctggccatgactttcagaatgctgtgaacattgtcttctgtaagcaaacttccacttacaagttttaggcctctgatattagaaggtcagcattccttactcaggtatatctttacctgagaaaggatttttgattttactttctccagtaaccttgtcaatttgagctccatctatatcaccaaaatgatctgtcatgtcactcaaagacaaaaagtgaataaagcccaagacattagatgtttagcagtttgaggccaaagaaatctggcaattttgactttttccaactgggggttcactatcatcagtcatttgtttagtgtctacacactcttttctaccctttaaaaattgtatttcctctatttaaagaagcatggattttccatattttaatgtttctgaagcaatatcttacaattgatatgctcacttagcatctatttcttcatgttatcagccaagctatcattaagccaactatttttcaatttatggcaacttggatttcaggagatgttatctctcaatttcctcttcctttcttcatctctgctgctatcacttgaacttggaccactattgtctttttttttttttttttttgagatggagtcttgctctggcacccaggctggagtacagtagcgtgatcttggctcactgcagcctccgcctcccaggttcaagcaattcacctgcctcagcctcctgagtagttgagactacaggtgcgtgtcaccacgcccggctgattttttgtatttttagtagagatgggatttcaccgtgttagccaggatggtctcgatctcctgatcttgtgatcctcccatctcagcctcccaaagtgctgggattacaggtgtgagccaccgcacccagccccaccattgtctttgaattaaacatttggaaaagttggctaactcgtctacccacagccatctttcctacctccaatccatttctcattagatgccatactgatcttataaaacacagctatgatcttctcattcctctgtttgaagtcctttcgtggcttttcattgcttttaagacaaagacctgaataattacagtggtttgtaggactttgcctgaccaagcccttgctttctcatctcatctctagctctacctctttctccaacctccatgctaataggtcagagcaccccaacttcagtcattcagaagccatgtatttaccatattcatgtcctatttgtaccaacacttactattaaaaaaagcttatttttgctaatatttaagttaattgtacaaggaaattgttttgccaccttaaatggaaactactgttcttctaatatgtatttcaaaacacttgaatctattaaaattaaaaagttagcctttttatcagcaaaagttcagctgtgtgcttccaggggttcacttaccactttttggcaaccagttctctagctgaagctctctgctctgttatctctgaggattcttctgccttcaagggtttggcctctttttctatctccctgatctactttcccttcacttagctaactcttacccattcgttaagtttcagcctaaagagtctctgccccaaattagattccagtcaactgtttaatcctatcagattaactgccctcttttgaactttatagaaattacctacccacccatatacttaaaaaaatggtatgatggttaactacaatataaagaagaaagaaaagggaagtggcttacaataagctaagtattccaatgtaaaggcttgggcacaactctacttgaagacataatgaattaatcaaatgcttatatctacttgatatgagtgaaattggatttaagaaaagaatatcaggccgagagtggtggtttatgcctataatcccagtactttgggaggcctaggtgggcgggttttattttctcctcacagttgagctcaggagctcgagaccagcctggccaacatggtgaaaacccgtctctactgaaaatacaaaaatcagccaagcttggccgcatgtgcctgtaatcccagctatggctaaagcaggagaatcacttgaacccaggagggagaggttgcaatgagccaagatcacgtcactgcactccagcctgggtggcagagtgagactccatctcaaaaaaaaaaaaaaaagaaaagaaaagaatatcacaagccattctgtgaaatgagtacaagaaatgaaagatgagaggtttgagggatactagaataaaagctaacctttggatacatattaatagtaatatacatgatgagaaaaagagggaaataaccttagttgaagtagagctaacatgctaagataaataatgcagttttgaggtagagaacataggcaagtatgccattcctggaaatgagtgggacttacttaaaagggtagctgcagagtcattccctatattatgaaaagggactgagtggtgttgaagaatcacaggaagaatacctctcatcttgaaatcatgtcttatgttgatgcatacatttggtctctagttcttaaaaagcacttcggtaggccacagggaatagggaatggattggaaaaagaagcagtaatataagaagccataaagaagttgtgtgggagacctctagggacagtttcactgtaagactgagaaacaagaagcaaatccaaagtaagtaaataattttaatcagtaattttcacagtgtagatttctcatcattgtgctacagattttttttaaaggtatgtactgtggcagtaaaatgaaatataaaaaaaatgctttccatgaatgcaatttggtggtatccttgactttcatgtcccatggccaatttaataatatttggtgctaggcctatttctctcttacgtatttgcatttgacagataagaatgcaaactaatacagttgtgttatattggtagactgggtaccaaaagccccattgctgtcggtggtgggattttctgaaatagtgaacaactggtaaagtgttgaacaaaacaaaatacattattccttcagtttaaatgctagttgcatttctgaaaaattcagtgaaaattaaaatgtgcaaaagatactttaagctattatgtaaaatagacaataatattttttttctttacctaagtgaatgtctggtggaacatttgaaagttatgagggatacaggatcatttttcatcatgtgggcctgtcctacataagaacatttggtggccttgttgcccctcagaaaatatgagttaaatggctgggcatggtggctcacacctgtaatcctagcactttgggaggctgaggtgggaggatcacttgagctcaagaggaggtggagaccagaccagcctgggcaatatagggagactccatctcttaaaaaagaaggaacatagagagctccccaccgctcctcacatttccaaaaaaaaatctctctaggggacaatacaaaccccattgatcactaccatgtaaaagcctctcagtgggctctgtatcttccttcacatttagcacacttttagtaacttgttctttggctgtcttctctgacagtttgaaggttccatgagtccaaggaaagttggactcatttatcattatatctctctgcctgggacagtgccaaacatatggaagattttcaacaattacttgttgaatgaagaaaaggacaggggcagtgccttaggctccatttataggtaccttggtaaattaactggagagggttggaggtgacacttgactagtgtacccatgcatctgagtttgctcaggatagccctagtttttaccagttttctctgcatcttgtccagtttagcatttttttatatatacatttttttgagatagggtctcaggctgcagtgcagtggcacaatcatggcccattgcagcctctaactcctgggctcaagcaatcctcccccatcagcctcccgagtagctgaggctacaggtgcgcaccaccacatatggctaatatttttgtattttttgtagagactggatctcactatgttgctgaggctggtctcaaactcctgggctcaagccatcctcccatctgtgcctcccaaaatgatgggattacaggtgtgagtcatggcacctggcccagttaagcattttttaaaaataaaaataattttactttgggaaatcattttagaataggactgtatttcaactgtcaaccagtaaaataaaaccaatttttcagtcaacaggtggatatttaaaaaattaaattatttttaataatataaataaaacaatttttatttattaaacttattaatttttatttattacttttatttaattttattaccctgcttcagtctcagaagtgtctcattttggataataaattatttatagtcaccctaggcatgatccttagcaacatatcagaaggttgtccttgtcattgtacccaaagtaaacccttctcttcttttcccctggcatggggtagatgtcatggaaataccatctattactctgccatccactggtccaatttcaatggtttctcacttctctgaatgttttctgtgactggtgatgacctttcagccctgaaatatttgcctcttaattatttgagaggtttacttttagtttcatcaattagttttctttctctactatactttcagttaaacgtaagttttaattgttaaaactaacagattgagagtgtttctatggaaaactttatgcctttgagaatctttccattgtggcatgaagatccagaagaagcagtccccactggggcatataacttctttctcttcttttgaactcttcatctaggagtatgagattttacaaatttatgctctgaattttgttcattacattttccttagattgaaaccaataagttatgaatttttaaatatactgttaaaataaaataaccataaaaggaaatattagaccttgccttaaagttaaaaactgtatgtcgtatattttcccttgtattaattcaagagaaattattgcatatgctcatgaaaaagacatatacaagaatgttcatggaagttttatttataatagccaagcacttgagaaaatccaaatgtctatccttagacatcattgtaaacaaattgtgacatagtcatacaatgaggtggtactcaccaacaaaaaggaacaaacaacaaatatatacaatatggatgcatcttgaaagcattatgttgccaaaagaagccacaaacaaaagaatgcatactgtatgcttccatttgtgtaaaattcaatagctgacaaaaggaatcaatgatactagaagccagaaaaatagggagctaggagactattgctagaaaggatcaggaggtaattttctggaaataactgcatactttgttttaggtggaagattcttgggtttatacatatgaaatgccatggagccatatacttaagatttgtgtattttactatatataagttatccctctaaatataccatagagagaaaataattcatatagaatttctttttcattaaaagatgatgtgtgtttgtttcgaacattaataaaaattaaaagaaaataaatcatcgatagtctcatcacataaataactttcttccagtcttttgtctgggcatagttttttgtttttttttttaaacttttctcccttctatccttctttctatatgtatttaactggacttttgaatcctagaataattctttctgaagttaaaataagaagttcatttttgaaattacatttatgatggatcgccttcacattagaacatttatcatgaatatactggccaaatgataatgtcaattgtagctagaaagaacttggaatttgtttgtagttttttccaagggtgaaaaaggaactggctttcctgtaaatgaataagttgccatgattctccctaaatctttacttcatttatttttctgctccctgatctcatattgtattttcatacagggttgccactgtaggggaatcattttaaacccatggatgtaactattatttttttatattttcatacatttataagtcttctataaatcttgatcgaattttttttgttatcttcggggaatagccatgaaggtctcaatactgggaaatttggggatatcatgcagcctgacaattcatcacacactgttcttaaaattcatattgcagcatattaaaattggatcccaagattccttgcagaagaaccttggcactctgactcaccttatagtgagccaacatgacagaaaaatacatcatttttttctaccgtcaaaggaaacaagtatgaaaataatggaaaaacgtgtagtctaaaacaaagcaacataatttgcagtgtgagttgcctaatgtattatatagttattatctcgcctaagctccctaggtaatataactgctaatattaaaaatctgttttgttttgtcgcctcaacagaacgttttgccttgagacttaattaatacatttctgtcttaggcatgtattttagacacactgggtgtacccttaaataaccttcaggaacaatactcatttctgcactgttttgagaggtagaaaacaacaacaaaaagaacttggtactctgtgttctctctgtaaccagaagagttttgttggaagcatctttattagaggcagctgtcagtatgggatttatttccactgggtggaaacaaaaggtgctacagaggaatgtacataaagatatcacccatgaggcatttggataaataaaagtgggcaatattaatgatgctcattagcagatgtcactgttggggatgaagtaaattccacaccaaagtgtttcatatattacacttttcaaaactgtcaactttttgactttgatgtatgtccatgtgaatagttttaataagttcctacagtagtttctttgcatataccctgaggaattctatggaactgctggcagcaatatcacaaagacattttttgcctaatgattggtgcttcacttggaaatgtgaaggctcagatcattacattcctacttattcatggtgcaaatatttgtctaagaattagttaaaaaatattgtatgaccaagcagattctgtagtttaaagcaatcttctatgggctgttgcctgtataacagaattacgtatgcataaaactgcttttactgtagaagccaaaatgcagaataatagcttgtcaaactgtcgtttgcaagtgagatcatagattttatagtccaaattaggttgtgttcttttcctttttgtcaggtcatattctaataaccatattgtgcactaaaccctgtgattatcccaacacttgacagatggtaggctgttaatttgtatgtaagagacagtgattgccagagccctaacagtattcagcaaaatatgaaatgtcaaaatccacttttggttccattttgcttgatttcattttagcaaggtaatgctaggcagaagagtttcagtagctcagcatatgtttcattttactactctgtatggttttactaaccactagaaatagaaaggattaagaaagaagtaatttgttttatgtcgtgctttctcctttcctgtggagagtgatcatcagcctgaagggttaattgaagggactgaatgagagcttagggcagacaggatttaattgctcaatattgtggataattgtggtacagtagtagcatacactgatgtttataagtatgatggggacaaaataatttaaaagtttaagttaaaagtgcactggcaaattcactaaaaaactattggaactactaaacgagttcagcaatgtggcaagatacaagatcaatatacaaaaataaatcttatttctatatactagcaatgaacagtctggaaaagagattaagaaaataatcttatttataatagcagccaaaaaataaaatatctaagaataaacttaacagaagtataagatgtgaaaactagaaagtagttgaaagatattaaagaataaataaatggaaagatatgccatgttattggatcagaaaacttaacatttttaagattgcaatactggccaaaatgatctatgtatttaatggaatccctttaaaaatcccagctgtttttttatttttttccccagaaagtgacaagctgatcctaaattgcatgtggaactgcaaatatccagaatagccaaaacaatcttgaaaaagaagaaagaagtttgaagactcacacttactagtttcaaaacttactacaaagctatagcaattaaggctgtgtggtactaacaaaaaaggtagatcaatagaatagacataaaccctcgcatttatggtcaattgatttttaactaaagaaccaagacaattcaataggagaaatattagtcttttcaataaatgttgttaggacaactggggatgtctacatgcaaagaatgaattaggacttgtacctcacaccatacacaacaattagctcaatatggatcatagacctaaatttaaaaggtaacagtataaaatcccttggcaaaaccatatgaattaatctttgtcatcttgagttaggtttcttagatacaataccaaaagcacaggtgacaaaatttaaaaaatagataatttagactttgttaaaacttaaaacttttgtgtgtcaaatgacaccatcacaaaagtaaaaagatatacccaaagatgggagaaaattttgcatctgttgatggactagtatctagactatattaagaacttctgcaactcaactgtaaaacaacaaataacacaatttaaaaatgtgcaaagtatctgaataggcattttcccaaagaagatatacaaatggttaatagcacacgaagagatgcttagtatcactcattactagggaagtcaaattagatcaaaccaaaaccacagtgagataccacttcatgcacactagaatggctaaaatagaaaagacaataacaagcgttggtgaggataaggagaaattaaaaccctcatatgttttggtgggattgtaggatggtgcaaccacttggggaaaaagtttgacagttcttcaaaatgttaaatatagagttaccatataacccagcaattctataccttcctaggtatgtacccaagagaattaaaaacatatccacacaaaaacttgtacatgaatgttcatagtagcattattcataattgccaaaaagtggaaacagttcaaatatctatctacaatgaatggataaacaaaaatggcatattcctataatggaatgttacttggccataattagtaatgaagtgctgaaacatgctacaatgtgaatgaaccttgaaaacattatgttaagtgaaagaagctagtcgcaaaaggacacatactgtatgattccatttatgtgacatttccaacagagacaaatccatatgcatagtagattagtggattaatagggctgcaggggtagcggggaaattggagtgactgctaatgcacatgggctttctttttgggatgaggaaatgttataaaattgattgtgttcttggttgcacaactctgaatatactaaaaatgaatgaatcgtacagtttaaatgggtgaattttatggtttgtaaatgtatctaaataaagctataaaaaagcacattggcaatagaatagtaaaggtaattcatttattatgttagcatgacaataattgcctggactgtcaatattacactactagagacaaaagaatgcaatttttcactttaaaactccaaaaacagatctgcagttttgtttgtttgtttgtttgttttagacagagtcttgctctgtcacccaatctggagtgtagtggcacaatctcagcacactgcaacctctgcctcctgggttcaagcaattctcctgtctcagtctcccgagtagttgggactacaggcgcctgccaccatgcccggctaatttttgtatttttagtagagatggggtttcaccttattggtgaggctggtcttgaactcctgacctcaggtgatccacccgcctcggcctcccagagcgttgggattacaggcgtgagccactgtgcccagccagaaaattttttttaggtattaattttcttgacacatctgaatgctaaataacgacaagaccaaggctagtcaaaggctggtcaaaagctttcctctgcagcaccataactgtttagaaatgccaaatgaccagtggttttccaatagtgtaagcaactatctctcaaaaacaatcacgtaacacaaaacacataatatgcatgcactctaaatattatatgctatgtatattataatgtattatacatacatataaacatacactatacataaacattagaaacttataccaagttgtactcatgactgtttttttctttcccagtaatccttcctaaggattatgtcaccatcttatttttccctgttaattggttggatgatttctgttgtaaaacatttcttttaaataaaatgaaatggtgatatcatgtattattgtaatttaaaaagcagttggtatcttttccctcaaacttgtatcttcacaatttgtaaggctattattaattttgtcatattgtggtaagggaagggtaacattccatgcaggtaagaaacaaatctgaaatttactaaagataaaaaaaaattccctggtaaagaaacacaattttaaaatacactgtaaggtacatattaacgatcttcactaagatagtgaaaaaaagctttaagtctacctttttaaaggattttgtaggttaatattttccctttctttctttctatgtgtcagacttctagcttttcccctaaaatatgttcattacaggctaacagcctaattttaaatattaacagatactcttgatatgtttgaattgccccttttgataatggcatggcttaagaggtcctaatgaaaaatgttaatgtacagataatttgtggaataattttttattaaatattataacaattattttttctttttctatgtcatttttgtaatgatcacttttaatggttgcatggttttccatcctattgttatgccatgaggtagcgaagcacactaaattttagacatgagctggagcacttccagcccactcatttaaaagaggaggtaaggtgatcacagcaggttagcagtctaaagtagaaccctggtatctttttcccacctcagtgattagagtcacattcaaatacatcattgacttgatttattttgcatgcagttctcagcagcacttctgtagtacaaaatgatgcataatcacattgttcttagatattgggagaaaaaagataaaagatggaatttaataccaaagcttacttttgactcagcagactaaagttttagtccctgggagaaaagggaatcagaggagagagcaacctgatattttctatacttaagagtgaaaccaaaattggaaaaaagatataatcagaacccaccaccatcctatttcagcacagcatgcaattctcagataaaaaaaaaattttttttaagagaaagcattttaagataatatctccatgagccatttctgtaaaaagcaagtgaagctttgactccccctgagaaattgctttgcaattgtgaaggtgcagagccatggctctgggaggcagattggtcctgtaggcttgtgtgaatgagatgatctgcatgaaacttgagtagtaaatgagaacccattgtagggcctgggtgaactgcagtcatcccggtgatgcagatttcccaaagaaagaagccctgagtaaccaagtattctattgctgggaactggtacgaacttggtaactgattttgagaaatgtcattgccattacaatcctgagaaagctggagcctcctctgggtcagccaattgaagaagctataaatgacctccgtttttcactgaatcagggaaacacaaagcagagaacattggttcttgatttctttctttctctccttcctcaacccaacccactcaggctagaaaaaagaagtggaagctacatcgtaagagatagtttctgtgtcctgtttctgagacacattctcattgcttgggtggagtggctgggaaggatgtttagtattgactttcaaatgaacggatcaaatatctctctgggctacagaatttctttatctgatattgccacaacaggcagctcagaggtatttgtctgtatccctctgggcctttcttattctgactgttgaatgaaaggagcggatgactaagacttctctttgaaaagaagtccattatcagtgtctttgaagctccgaagactgagtacattctacttggataaagcaccacaataggtggaaggaagcaaagacagccttataaatttccctgtgagcaagcagacctattgctgtctttattaaaaagatgccaccaagcaggtggtcctgttctgagtgatacccccgagagtcggcttgaaagaaatcaccggaaacttcacatctccctaaaacagcttaggctgtcttgagaaatgtgaaaggtgatcagatgactgtgccaagtgttctgggtgtgttgaacatatgtatcctcaaattgtaaaacttgaaactttggcaattatgttaataaaggtaagcaaactagttgacatcaacacatgcattctgtttcttctttgtacatccgtgtacctcccagcgaggactgtgaaccagattccgtatgtattcaagactttcattagataagaatggcatatacttatcattagagcatactaattaaagcagaaagtgacatttcaaagtaatgatgctccctagtgtctcaatgtaaaatactccctagtctatttttaatgaactggtatgctatgtatgtttaaaatattattttgttattttgttttcattatttcagtggtggctatgaccaggaaggtaggacgttcttctagatataaggaaagaggccagtgaaacctaccaagagcttcgggctttgattgtagtcatattcagggtgtatccaggcattcttgcattcatttggtgctttgactgtatgcttgctacttgatactgtctgtgctaggttaataggacccagatagttcctgccctcaaggagattacccacgccctttgattatgatcaaagcaaagccgttctttatatttcctcttttgcatactctctaatagcaaaaaggatgatatgttcagtgctggttatatatacacccttgccagttactacaaactcttaggtattcttagtggataaggatagctaaagagtctccttacttattctatatttttttccttatatttgttactgaatgcattttcctcatagtaaaagcagacatcatcgtcatcatcatattcattgtttattaagtatagaaatccaataagataggtatcactattatttaaatgttttatggaagactgaataagttcagagtgtttaggcaacttgcccaaagctacagagctggtaaatgacacagtcaggacttcttgacctagggctggctgcccccaaagtgctcttgacctttatgctttaatgcctctcattgtttcttattttttttttttttttgctttctcttgcatggacagctgttaaaagtcgttatcctcatagatgatgatgagttaaatacttaggttgtctttgatctgtgagtgaacgttgccagtttttgaatctttttttctgatgaattttctaaaagtgaatttcaggctttcaaatgactgtgctcagtgatggtgactgattttagaccgctcttgctattcaaattcacttaaagtaccagcattccttaaagtgatgtgtaccgcaaaccctacttgtaagattatagtaccacatatacatgagccaagattcaccatttgaaaatgagattggtcttcatgctacagcaaaatttattgaagcgtctattacatgcatactctgctattcaaattcatagaggaaattctatttatttatttattttccagcctacttctacaaaggatttgaggcaagcaaaaaactacaataagtgtagtttacttatcaccgagagctaaaaattcaaaggcagactatttttgtgaaagagaatgatgtgagatcttgatactggtcctggaattgatgtcccatctctaaaaacaaggtcccacttcctaattccatcacattgggggttaggatttctgcatatgaattttgaggggacacagacattcagttcatagcaaagatgtactggtctacaattcttgttttttgttaaagagattatactgcaataaaaaataagtttgatctttaggaggccgaggcgggcagatcacgaggtcaggagatggagaccatcctggctaacacagtgaaatcccgtctctactaaaaatacaaaaaattagccaggcatggtggcacatgcctatagtcccagctactcaggaggctgaggcaggagaatggcgtgaacccaggaggcggaggttgcagtgagccgagatcgcaccactgcactccagccttggtgacagagtgagactctgtctcaaaaaaaaaaaaaaaaagtttgatatagagttgcatacggggctttatttatgggctagtaagggcccacagctgtggttcttctttatttttttattatttaaagatgcaggaccttcagctgatttcatttggttggaaattctagagcagcagcataacattttgaagtcaaatggttaattttctttggaggcctttcctcctttggttattggatgctgtgtctatgttctttacactctggcagtgaggaggaagcccttgtgtgacaatggatttagtggggtataaatctacctaactagcagttggatgggatctgatgagggttggccccagagccaagccacattagccgagttagaaggatgtgctgatttcaacttcaagccacggggcccagcagagaactgctgggaagcaatagcatggcctgttgtgccaccgtcatttttgtcagcgccaccatcatcaccattaagcctttattaagtgccagtgtgtggagctcccttaggtgtcattgcagtctgacaggcagctgtgtgttttaaatacgagccttgctcagggccatgaggtgaaaaggcccagctgtaatcctaggcaggcccacaagcatggctgcatggttagttagtggctgtagcaggtttttgtttctggtgtctgctcagcccatggcccctttctctaagaactgtcactttatcttcaaggatgggccctggtgatcaggtttttaacttggctcccaggctgtggctcagtagatcaaagatccacagctgactcaagctggaccagccaggttgtctttctcagaagtgtggtcttggactaagacatatttgtagatagactaggtagatgtgtaaacttgggagcagtgggaagccatgtcttagattaattcaataatccttgtaatactcctatgaggtgggacctcttcttattcccattttgtagaagaggaaactgagtcacagagcggttaagtaatttatccaaggtcatatagttggttaatggcagagccaggcatgaacacaggtagtatgagctcatacttgtagccactgtataactgtctttcggagcaagagagagggagaaagaaagagagaggaatacaacaggcctctggagatatgcagattaaaagactgtgtgaggctgcagggagagaggtgggtatggggagagagtaagactgattgactaagagagtagctgccttgattctgtaggctttctagctccaggatccagacctcagtgtctgcactttctaaccttgggctctgagaagtatctctatgtccttataaataaatttcccttttgtgctcaaagcagtttcaatggatgtctgttacttgcaaccaaaagagtcttgactaagtgaccacactgtcacagtttggtaaaaaagacagtgggtcatccactggcctttgtagccccaggtatctttacattatctgtaggtagcatccaggctagtagaggagaaaggcaagtacaccagtgattgcagcatagtgagacagggctctgaaagaggtaagcgcataagttgctatagaaacttagagacgtggccaaaaattgagactgggatagggtgtggggaatcaggtcagcttctcagaggggaaatatttgagttgtgttttgaagaatgggtaggatttagccatatgaagaagggacggaaacaagggcattacaaatagtgagaagagtgtgtaccaaaaaaaaaaaaaaaaaaaaaaagagtgaaacctatgatacgttttagaaaaggcaaactattcagtgtgatggggaagaaggaaggagcagggatatgatataaaactggagttcttggggactgtgccacaaagagtctgcagtgctaagcaatggagtttgaacctttgcctgtaagctatcagttcattgagtatccagttccttccctccctccaacatggaagcatctctagattctgaaattacaaagattatattctgacaacattaaatgcagttttagaaacaacaacaatacatgcagaatcctaacacctgacaccagtgttttcatttttgccaccttatcttctagttgtcctcaaacacacctgtttttgcacatggttgcaatccattgacatatcattttcactttccagtagattaaaaaggttttccatgtttctatgttgtcctctcctaattattataacagcatgatagtccttcattcgacagaaggttttcctgagtaccaacactgctccaggcaatgtgttaggctccggtgaagcaaaagtgaatgacttggacactcctgcctttgaggaactcaggatctggtatcccagtctctgctgaagcacttagccgtacgtattttaagcatgtggttttaatattgtcattttatttaaaaagatattcagttctttgagggtcaatttcaaatccttttcttgtatagtcactgtcctcctacctccaacccccattgtaagtactctgtgactaaaacatagccacattttcctctgattctgtgttcatgcactacttacctagttttttgcatatcttatgcttcaagcaccccgaaagctgtttgatgactaaccataaacaggttccaaatcaagtttttgagccaagttaatttgattatgaaacattatcttggttgtggcaaatgcccagtggtcattattttaatgatacaagcctctacagcctaaactaattacaaaccagctttattctgggagtggcgggtgggtcgggtgaggggggtgggggcgtggtgacggtggtggtggtggcattgcctaaccagcctccctgaggctaatccaagtgtctggggatatgggatatgatcactctctgcttttccttcacctggtcctccgtggatgttgtctacctcattccctctccctccttgttcttgtgttaaagaaaatagcgatggttggccaaaattctccttaaattaaattttgcctcctacctccagcatgatcatgagcctccaaattaaagatgcagacaagttttcaatcagatttgccttttgttctgtatttagatgcttttagtttttccctttatgatgctttttttgacttcaactagctctgtgcttttggtggtattttgtagctggtttttgctcagttttctatatctaaacatctttattttctgtatttctagtccacgtatttgatgaaaacacattgatcaattggtataaattttttaaaatttaaataaatgtattcattaaagagtctagaagtgcttcattatccatgtaatgaagaaatagacagggaagataaataaactaaattctctagtaaaaccagaaattcctcatatctgattttactgtgtgtatgtgtgtgtgtgtgtatgtgtgtgtgtgtgtgttcgaacacaaggatgcaagtgtgggttattgacatacacttaaaatgaaataggttgttacctcatagatcttaaaagctttaaaaactctctaagcctcagttccttcctttataaaatgggaacaacaatactaatgagtatatacagttgcagggatgatttatttgatgatgactataaagtgcctggcacatagtaagtgctcaataaatatcagtggttaatatgcccttgacctagaggagtacaacgccttctctatgatcttaactttgagctattagtaagtccctaagttcatatttttatgcagaggccaaaaatcattgaaagaaagcttagaccttagaaaacttcccaagccactttctcttagcattctttttttttctccttaactagcctgggctgaatgattagccatttccacctagttctcaccaacactacctttgtggcagatgcccctgtggccattttcacagtccctctgtgaaattatctctgatttcagcaacaactgtggtgaccagttttgtccaagtcagcttcccacctctagcccctacttttctgcttttctgctttcttccccaagggcatctcttatgctgggagtctgcatggcctgggctgaagaggagcctggacgtctgtgggaataaatgccctcagaggctactctcagccactgggcatttgaacatgtgaataagtgctccggcctttgcgattcaggtgaacagttctggaggcaagctgtgtacttctctggaggttctggccaaaccagcctcttgctggtttggcaagtggtaaacttgataatgtacccttagttggcttttgctcttccctttttacaccctatttcctcatctctgcttcctggagtcatctctcacataaactcctgcacctaagtccttgtctcaggttttgccttcagggcaacccaactcatgacaaccctaaaattttctgtcttcttgatacttctaggactctgcccatataatctttagccccagatcatttctccttcctttgaagagatgtctcatagctttttgaagtcagactctttttctttgatcttgatcctatctgctcttaaatcctgtgggcccacagaccattatatcctgtttactgctatacttccaatatagaatgcttggaccatagtagaagctcaacaaatacttattgaatgaataattattttcttgcatgttttttagtttccttctgtgcacacctgctgttttcatcactgttttcagcttttctttgggagtttgggatctcttgctttagaaatagacactgcctgaatcccagtgcccaccactttctgaggcttatgagccaaccccctacccttggtaatattgggccccactaagcactttctctttcttgagctctacctcccttgacctctttgtgtgtgtgtgtgtgtgtgtgtgtgtgtgtatgtgtgtgtgtgagacagagtctcactctgtcgcccaggctggagtgcagtggcgcgatctcagctcactgcaacctccgcctcccgagttcaaagcaattctcctgcctcagcctcctgagtagctgggattacaggtgcctgccaccacgcctggctaaatttttgtacttttagtagagatggggtttcaccgtgttagctaggctggtcttgaactcctgacctcagttaatccacctatctcggcctcccaaagtgctggcattattacaggcatgagccactgtgcctggctccttgacctcttaaaatacaaccctctcatggttgttctcctggctctcagactttctttcccagtatttttgctgtattatttagtttgcttggattctacctctggctttcttcagggctccatctttgagcctcttttcttctggagtcatatacttaacccgagtaaagcagtgactctcctctcttccactacatagatgattcctaaatctataatctctggattgactgctgagtttcaagctatttgaaatctccatctggaattcttgaagatttttccaatttaccttgtttattctggaattcattttcttctccctattttccccttttcctctttttctatgttctgtcttagttaatgggatcaccagctacctggcattgcagtatagaagtctttatgtgatccttaagtgccttcccttattgcttccaaaatatagtttttgagttcctactaaaagctagatactaggaatacaggaaccacaaaacagacatggttgtaccctcaagaggttcacaatctggtagcagatacagagattaattttatttattacagaaatatagcattataaactgaggtcaatgctgtggaggaaaagtccaatgtgctttgtgagcatgtccagaaggacctaatttattcttggggtttgagacgtcttcctttagaaagtggcatttgatctgagatgtaaaggatgaatatgaatgaattaggagacaggaactctttcctcttcatcactatgcactatagtcgccaactaccattgatttttgcctgtgaaatgcctgttttctatattctgttctcatcctgggccactgcaatttctgcttctactccctacaccccatttctatccattagttttcaatttctgccagagttctttcactgaacacaaatctaccacatttttttttcttttacttctggcttaaaaccatcgatagctcccttgtgcttccagagtaagatcttaacgttctggaatggcttcaaagacttttcaaattttggctctgacatttatcagtagcctcatcttctgcactcttaaccatgttgcctgtgctgtggtcactgtggactctttacagtttgctcaagtcactgtgcccttcattcaacacccttgggtttctctatccttcttttgcacttgtcagctcctcctaatcctaagaggccctatgtaaatgtcacattttccataaggcattccctcactccttatcggcatccccatgtttgcatttgtatgtttctctcatagagctcccatccatttgccttatattaacttagttgtctgtctaggacatgtgtttatctggcaccaagattatgttgtgctcatctcttccttcccagggcttgaaatacagcaggtgttcagtaaatatttgtaattgaattgtctatggatgaataaggtaagggagacaagaaatggaaactggggaactgaaacagaacagccagaccttttctgagaactggtgatctcatgtagggctcaactaagacatgtgggtggcccatgcagactaattcagtattccttcagcaatcaagtgaagtaacagatttgagtagtgctgcttgtggaggaagatgacaacagattacagtgtcctggcctccatactcagcttagcaaaatgaaagccctttgattgttggaaccaccctacatgaaagcattatattggccttgtttttagttttttcaaagcatatcatccctattctacctcaattgttttatcgaagtatttcttacaatgaaacccagttcccttcttgaagaaagttctgataaatgctgttttcttcattgtgttagttttctggggctattttagtaccctcttagattggtaccctgggcatctgttggccagtcttcctgttaatcccgttctgacaccaaggaaggaagactgggatgtgtaaagctcttatccagtattgcaccactaacctttaaagaattccttttcagtcctgcctggcttatacccaataaacaacgaaaccttttttgagtttcagaattgtcaggatgttgctgtgaggtgcacagcagactgggctcatgttctggtctgtgctcttacaaatgacaggcaaatggcagtggcctggggccaagagtgggccactactctccaagcttgacaagactgctatgtacctgggccactttgcatgtccagtgcccatccacgcagtcctctcctgaccaaggctgcgaagaatgtttaatgatacaagagtggtggaagtatggggagactttcggcccagacagtccacttatggccttcacttgagtgtgctgaggaaggagaatattttgataacaaccaaagatggatgctagcccatccacctttttgccaatttgactttgttccttgggatggcaacttactgatgctgatgtccactaaaaatgcagcagaaaattagtagttgctaagagataggaaggtagagtaggagaaagatgagttttgcttctagagtactgagtactcactctgtgcaaagcactgtgtagatgctggaggaacaaaggggaatatgatatggtatttattgtggaggaagtattatttttacctgttgagttgtttaaatccttttttacttctaagggatagtagaggtaacaatttgggattggtcatttggaaaattcagatttatgtcctgagtcaactaatctttcattagaactttggccaactactttaaccctatgtgttttataaaatacattatgaactgttttgtaaaatgctttcaaatatattatctcatttgaatttcatacaggcctaggatcattattttattttaataatgagaatcatgaaacccaaagggttaagtgtcttattccagttctcccagcttctcaaagacagaatcctctgtcaccactggtctcctggttcttttcgtctgtactcaacaacctccctgcctagaagagttatcgtaaatgcagatttttatatagcctcagcttttatgtatttcaaactcactttgaccctacacagccttctctttagctcttgtgtattgagtgttaaatgtgtgtggcatgctcctgtgttcgtgtgcctcttatccttcttcctaacctagagcttctttattttgtccaaaatttttatttttttgagagggcctgggggaacatttatctttttccagtcttatagttttccatttccccaatttctgtgaacaatgataatggtaagtaactaatgatcaaatgatttctttatgtttaccctgttaggaggtgtaccggaattcagaattgctgaatctttggggaaattgtaagaatgtggatttgggaattttgtacaagttaaacgaagcactgagatcttagtatagggaaatcttttcggcactgagcagaggactcataagtaacacaacacgtggagttgtatggtcaaggaaatggcagaaacaggttctttttgcaaaggaagttttccctggacattcttaggtagcagacgtttctttttcttggacctcctatagcatttattcagaccttttttatgacttgcattacttcttgtactatattttagtacttttattgttatcatctctcttactagactctggtctttttgaggacaggaatgttttcagatttactttgccaactctgtggcacctctagcacacagcctagaatgtagtggttaacaaatacacattttctggaatttctagagacttatactttctccttgatgtgatactatctcatttgaatattttacagtaagcaggtattaccatgcaatcaggagaaaaagtgaagatataaatttcttttgaatgattaaatggataagtgaatgattaagaattcagtgctgctagggaaattcagaaacaaggtatcatttactgaacatttaagcactggttttccaagaagtgtaacatttttcatacttattaccctaagtactttttcagcatcttgatgaaattggatggacataggtgtatagtagctgaaatagtcaatgttcaagattttcacctcctgattcaattcagtttctctaagcttcgaagatcttgctttgaatttgtattttgttcaggtgttcccaagtgattttaaggcagcagagaggttattaaccaaattgatccctggggtgtgaaaaagtgaattcagcatctctcctgggctccatctccagagtggagccatttcatcaggagagtctggttcattcattcctgagttcaaccatgttccaactattcatccatttacagtcctccatccctgtgcaatctgtcaccaagcagttgcacactctccttatttcaggttgcacagaaccagagcaaaaaccagacgggataaaaattatgcatgtatttagatgccacaaattgctttctcattttctcatgtcgacaattaggatgatttcaaccttatgtcatatggactgaatgtctctgtgtttgtgtcttacattgggactggcatgctgttgatgaacacatgaaacatttctagaaaatacaaagtaggcaatgctttccaagttaatactttgattgtgggatgtcatagtctttttggactcaaggacattgtttatttacaattattgaggcctttgagactttgagggagctgcacatcagcttgtatggcgtgacatatacaattcagtaatgccttgcttgccctccttacgttgcaccttagaatttatgtaggtcacagttactggagcttggcatttttcctaagtaagaacatatttcacgtaggaagcatgtatagggtccaggcttatgtatgccagtgaaccttttgaacaactttcgagttgagcattggagaggaagaaaaacaggtagtagataaccttgaatcttccagaatgaacattgagaattaagaaaaaaaaaaacaaccttgttttttcacaagataagtgtttcccttttgagagcctgctgtatttattattcttttcaatcttaaagctttagtttaaatcccagtagtaacagagtttgaaatcaacgaactagagaggtctcaaatgatggctgctgcttttgggggataatcatttctttggcacacaaagagaacaccaaactaggacgggcccacatataacccctgtggatgggacatcatcatgaagactgtgtagctgacggaagcgcatttcagctctgaaaatgttgtcgcctatattgtaattgcaggttagattaaaaaaaattagggaagaatgctaagctatattgaatccctattatcttctaagttatataatttgaccctgctgacatgttttaagagatacttttatatttcatttgtaattgaagaaatagaggatcggggatgttaagtaatatgcctggtcctacaataagtcatcaaagttgtaggtttttcatttattccctggccttgcactgtattctgtgaatcttatatttaacaaacaggtcctatgtggtctttatgttttcagctggagtttatctctttcttttttcattattgtttatgttgtccttgcactaaataactttgtttactgatttttctcttcagatccctaatatctggcattgtaccttgtctgtagaaagtgttcaataaatacttgcaaaagagaatttgaaatctagtgtattgtcacacagacttggttctattttttacccgtttaatactttcgttttaacaaagcctcttttaaaatcaacaaaccataaatatttaaaataccttctatgtgtagatgtgtagagcaaagtaggaaatacaaagttcttcttcttctttttttttcagacagagtcttgctctgttgcccagactggagtgcagtggcatgatctcgactcactgcagtctccgcctcctggtttcaagtgattctcctgtctcagcctcctgagtatctgggattacaggccacaccctgtaatacaaaaaaaaatattttttgtatctttagtagagatggggtttcaccatattggtcaggctggtctcgaactcctgacctcaggtgatctacccacctcggcctcccaaagtgctgggattacaggtgtgagccatcacacctggccaagttactcttaagaggaaagcttaatatttaactgtgagagatgaaaactgtcagggggggtttgttttctgcttctatttttaggtgatcaatcctttgcctattttaattatttcaagcacatcttcttggcattttatttgccaattaacatttgattttctctgctgtttaagaattggagatcttatctcacctgtatcgatcttttatataaaattcctcctgtgagtttgtgtcatgccaaacaactgagtggcagaacaaactgcatagccatggcagtgtctagtcttacatccagcatccaaccatgcctcatcacctccaccactatggcttgggcccaagctactgtcacctgtcacttggattattgtggcaggctcataaggggtctttcttcacatcttttggttgattctcagtaccgaagtcaaatgattctgttacagcgtaagttggggagagatccctccttggttcacaacctgctcacttgccttggagaagagatggcaactatgatggtggcttacaaggccctgcatcatctgccaccgcgcttgtggttctctgacctcccttcctcctgcttttttcttggtcattccactccaggctctctacttttcttctagccttttagggttgctctgcccttcatttccctcagccctatgtgctttacttccaggaacttgtacagtagggcttgctctctcatcttcttggggtttttacaagatttccatgaggcccacaccattcaagttggaacctcctccaccacccaccctggtactctccccacgctccttccgggctttgttttctctacagcacctatcaccagctaacatgctaaatactttactagtttattttgttttattgttgatatggttcggctctgtgttcccacctaaatctgatcttgaattgtaatccttataatccccatgtgttgagggagataccagttgggaggggattggatcatgggagtggttcccccatgccattttcctgatagggagtgagttctcacaagatctgatggttttataaggcagttttccctgcccttacctgctctctctagcctgccaccatgtaagatgtgcctcttccccttccgccatgactgtaattttcctgaggcctccccaaccatgtggaactgtgagtcaattaaacctcttttctttataaattacccagtgtcaggcatttatttatagcagtatgaaaatggactaatacaattgtctttctctctcaactacaaagaagaccccaaaggcatgaagacaagttttttttttacttttgttttctgtcttgtttcctattgggccctgctgcctaggatggtgtctggctcaagtagatgcctgataaatatttgactgaaaatgagtgaaaatatagctgtcagactcatagatgccatagataccaaccagaagctgcagtatgaagtcaagtggctggggctttggaccacagaggtcccaacccagccccagctccacactgttgaagacaagacttagctaagcactggatcttggtcacttacttaataccctgagcagcaactcaccatcctgttacctatctataaaattggataggtaatacctacttcacagtgtatatggactggagaagattctatatgtcaagggcatactataatgattgatactccagaaatattcaatattgatactgtcatttaaaaaaatttccttgaatgattactcctcctcccatccttttcctgtttccccatctgactacctgagaaaattctaactgctccatcattgtcccacttagactctgatgtaaaaggggacacttgagcacatagttttagacagtttaaacctaattgtttcattgtttacatcttgaagaaaagacagttgtttgccagatgattttcataaaactttgcaatgtaatacccagttttaagccatctattaagaattgagtgatttgatttgcaaagtttctgggacatttacttctagagagttcctgctacctgcctggaaattttcagatcatccatcaggttatttatgaactttttatggagaacaattaggtatttataagaaaaattgagttaaaaacaaaacaaagaactttttcttgatccttccttttgctttgctattgactaaaatgatttcaaatatctattctatcataagttttcaagtatgcatatgcctaacataaggtagttttagcttccttctcttgtggtaaaaatattttgattcaataggtaaaacacaaacttgttcatgtactcaaatgtattaattttttgctttgtgtttagtaaaaaagtgccagttgaaataatccttaaatacaagtgatttcttgttcctgcgtgtaaaccattcttccgtgaatcatttttttcagttttttgatgattctaagggaaaaacctttcttttgtactacattaacctcacactgtatttacattaaataatattctttggagaaaaaatgatttggtatacttagtgaattatgtaacctcctagaggcactgcagactgttaatgctcagtggaacccagcagttgtaactgatgaaacatcagcatggaggctataaaataaaaaagaagtaattggggacatgttgggagctggcaaatggaaaacactagcagatgtagccctgaaaagaggagagaaagtttaaaaaatcacatttactagaagagtaactgcacagatggatgatcgaagttaacatttcattcagttagaaaagggattagagattatatttccatttctagtacttaaaagaagtaatacttaaactctcacaatgaaccatataaaaattactttacagcaaccatatatatcgcgaaagagtatttgtccatgaggttttcatctcttggaaacatagtatagacatttttggagctagcttgtacttatttttaagagctgattataagcttctcttcccaactccctaatcagtgatatcatgttggtagcctgaaaccagccaccatgagaatatgtattaatatttacaccatgaaaactgacaaacactacaattagaacacccccatcccaccaccagccgttgttaagcatttaccaccacacaggcagatatgtgcattaactgccctccgttaatggaggatgatggagaatgagcagagttcgggcattcaaagaaagcctctctgcctggttggtgtgatggaagtcctacaccacagagagttttggctatttcttaatactgaactcatgcataggcaatcatacactcatgatacatatgcaagaatcatgccaattggttttaaaatataaaattctgattctaaaacacgttttgctctaatagccgtcctcaacccagacttgttatgtctgtgtgccatgttgcctatcgtacaggaaaaaatacaattctttctcttcagtggtaatgatactattttctatcccctgccttcataacttttgctttcagttcatatatttctccatgctcccaatagtgaacctgacaagaatgggctgatggctcaagaagagactagatgcttttgatactatgttattcacataccttttcttttcctgggctcaagagtatccatgttgtacgtatttgtaagagctgattataagcttctcttcccaactcccttttcagtgatatcatgttggtatcttgaagccagccatggtgagagtatgtatttacaccatgaaaattggcaaacactacaattagaacacccccaccacccagttgctgaacatttattactacactaagggagtaaatgttgccattaacagagcaagcataatgtgggggatagaacaagaagaagtaggttaaagagaccctactgcatgcctacctttgatttctgcttcttctaatgtattttggtcatcttaataatttttatgttaacatcttatcacttaatacaatttttgaaaaaatgccacctttttttgttcttctcctttttttttattatactttaagctctgggatacatgtgcagaatgtgcaggtttgttacataggtatacatgtgccatggtggtttgctgcacccatcaacctgtcatctacattaggtatttctcctaatgctatccttaccctagcgccccagccactgaaaggccccagtgtgtgatgttcccctccctgtgtccatgtgttctcattgttcaattcccacttatgagtgaaaatttgcagtgtttggttttctgttcctgtgttagtttgctgagaatgatggtttttagcttcatccatgtccctgcaaaggacataaactcatccttttttatggctgcatcgtattccatggtgtatatgtgccacattttctttatccagtctatcattaatgggcgtttgggttggttccaagtcttgctattgtgaacagctgcaatgaacatacatgtgcatatgtctttatagtagaatgatttataatcctttgggtatatacccagtaatgggattgctgggtcagatggtatttctggttctagatccttgaggaatcgccacactgtcttccacaatggttgaactaatttacactcccacgaacagtgtaaaagcattcctatttctccacatcctctccagcatttgttgtttcctgactttttaatgatagccattctaactggtgtgagatggtatctcattgtggttttggtttgcatttttctaatgacgagtgatgatgaggttttttttcatatgtttgttgtccacataaatgtcttcttttgagaagtgactgttcatatccttcgcccactttttgatggggttgttttcttcttgtaaatttgtttaagttctttgtagattctggatattagcccattgtcagatggatagattgcaaaaactttctcccattctgtaggttgcctgttcactctgatcgtagtttcttttgctgtgcagaagctctttagtttaattggatcccaattgtcaattttggcttttgttgccattgcttttagtgttttagtcatgaagtctttgcccatgtttatgtcctgaatggtattgcctaggttttcttctagggtttctatggttttaggtctaacatttaagtctgtaatccatcttgagttaatttttgtataaggtgtaaggaaggggtccagtttcagtttgctgcatatggctagccagtttttccaacaccatttattaaatagagaatcctttccccattgcttgtttttgtcagggttgtcaaagatctgatggttgtagatgtgtggtattatttctgagggctctgttctgttccattggtctatatctctgttttggtaccagtaccatgctgttttggttactgtagccttgtagtatagtttgaagtcaggtagcgtgatgcctccagctttgttcttttggcttaggattgtcttggtcagtgtcatagttagcttttcttgttgcatcgatccctttaccattatgtaatgcccttctttgtcttttttaatctttgttggtttaaagtctgttttatcagagactaggattgcaacccctgcttttttttgctttccatttgcttggtaaatattcctccatacgtttattttgagcctatgtgtctctttgcatgtgagatgggtctcacacctctgagtcttaactgtttttccaatttgccagtctgtgtcttttaattgtggcatttagcctgtttacagttaagtttaatattgttgtgtgtgaatttgatcctgtctttatgatgcaagctggttattttgcccgttagttgatgcggattcttcatagtgtcaatggtctttacaatttggtatgtttttgcagtagctcctggtaacagtttttcctttccatatttagtgcttccttcaggagctcttgtaaggtaggcctggtggtgacaacatttctcagcatttgcttgtccataaaggattttatttctcctgtgcttatgaaacatagtttggctggatatgaaattctgggtagaaaattctttaagaatgttaaatgttggcccccattctcttctggcttgtagggtttctgcagaaagatctgctgttggtctgatgggcttccctttgtggataacccgacctttctctctgactgcccttaacatttttctttcatttcaactttggtgaatctgacgattatgtgtcttgggtttgctcttctcgaggaatatatttgtggcgttctctgtatttcctgaatttgaatgttgacctgccttgctaggttgaggaagttctcctggataatatcctgaagagtgtttttcaacttggttccattctcctgtcactttcaggtacaccaatcagttgtaggtttggtcttttcacatagttccatattccttggaggctttgttcctcccttttcattcttttttctctaatcttgtcttcacactttatttcattaagttgatcttcaatctctgataccctttcttctgcttgattgatttgactatgatacttgtgtatgctttacgaagttctcatgctgtgtttttcagctccatcaggtcatttatgtttttctctaaactggttattctagttagcaattcctctaaccttttttcaagtttcttagcttccttgcattggattagaacatgctcctttagctcagaggagtttgtcattacccaccttctgaagcctacttctgtcaattcgtcaaactcattcttggtccagttttgttcccttgctggggaggagttgtgatcctttggaggagaagagacattctggtttttggattttttagcctgcaaaagtgccacctttgaagactgaagcttggggacctaccagtggttggttggggatttctaaaggcatttctgtaaacgagaaaagtcttctgacactttaggtagggttagcttgctgagactgccaagggatgatgtacactccaacctgtgatttctgatttgttcttgaatgaaaattgttctgtaaccttttgaggttaagactcagtattcaaatataatgtttgcttcattgaaaagcttggcatatagattgcctttctgtagtgaccatctaatataaaaagatttctggaacatacatgcccaagacatgtctaaatatagtagctaatgtttattgaatgtttgttatataagtgacaacatgctaagagttttacagagtcacccatagtgatcttatataatccttatcatagtccttagtcctttggatttgttaccactctattaaccctatatctagatggtgaacttagccttagtgtataaagtaacatgccctggttcactagtgacagtgaagaattgaacccaggtcattcaagttttgagctcatgctctcagctgctatatttaattatctcttgtaactcagaggttgtgttaatcaaggttatccagagaaaaagaatcaataaaaagagatttattatgaggaattaactcatttgattatggaggtggagaagtcccatgatctgccgtctgcaagctggagattcagaaaagctggcggtatagtctcagcctgagtctgaagggctgaaaaccaggagacctgatgatgtgagttctagttaaagtctgaaagcctgaaaaccagagaactgaaggtgtaagtcccagcccaagggcgggagaaggctgatgtccctgctccataagagagagcaaattcacccttcctctgccttttgttttatttgcgccctcagtggattggatgatggccacatgcatttgtgaggacagttatctttactcaatctactgaggttcaaatactaatctcttccaaaaacaccctcacagggtgtttcacagacacacccagaagcaatgttttaccagctacctgggaatctcttagctcagtcaagttgacagtaaaattaactataacaggctgggcacggtggcttgtgcctgtaatcccagcactttgggagactaatgtgggcagatcacttgaggttaggagttcaagacaagcctggccaacatgttgaaaccccgtctctactaaaaatacaaaaaaaattagctgggcatggtggctgtaatcccagctgctcaggaggctgaagcagggaatcgcttgaccctgggaggtggaggttgcagtgagctgagatcacaccagtgcactccagcctgggcgacagagctagactccatctcgaaaaaaaaaaaattactatcacagtatctatgaagctaagctcttatgaatgacctggctgaagtgaggagagcccactgtgagggaaggctattgtaggatcactgcagtgcagattagtaaattgcagccatcaattgattaaatataaaaacaggtgtatgcttggggatggtgacttcagtgacctctaaggggctataccactcttccgtgcaaaactgaaatgatggtgcccagtaaaatgtcttccctgatcatcattcaccttctgttggcttgtttcacaaatagtgaaatttgatctccctcaatgccatgatgggtccagtgggactaggatcaaagttataaataacagggataagtcctgcttgcaaatgggatatcagagacgatcatgataatgctaattaatattaataaataaataactttatggagaacttaccatgtgtgagataaagttccttctactttacattcaattcttacaacaacactccagtaggtacaatgagccctatttcacaaataagggaactgacacactgacaatctaagttacatgctcaaagttacaaagtggaaagtgatgaagttgagggttgagcccaggtaatctggagccagggcccacatctgtaaccctacaggtgtggaatgaggtccaggtgctatgaaaaatgatgtctttgaaatggaaatacaaaccagtttgtatgccagaaacttttccctcttggctttaattctggatagagggtaacttgtagatgatctaagtttaaattctagaccccagtgttaggattgtctttcgttacagctccaaaaagatcctccagtgaacatgggtccttcttgctctgctcacatctcagactgcgggtagtgtccactgaggccaactactctgggaatcttcaggaaatagagataaccaggggaaaatgaacagtaattacctggcattaagttgagaccttttgtgtgaaaggcacgtgaagataggcctttcagcgacttaatgagccttatcacgggccttcagcttttctgaataaatttggaggtaataaaatgttggaccttgctttcaaaccaaattatactacaacattattttgaaagacctttggaacaagtgactgaaagtgttttttcccctccttcctgaagatagaatcagtttctccttattaatgagaacccagagtaatttcagaagacaatgagtaaataaaagtatttaataaaatgaaatagaatctgatttgtataaatgaactcaaaagagtgccccatcctgtttgccactcgcagctttgttcattcgttcggtaaatatattatagtatcttctcactatgggccagacactgagctaggcactggtaatgacaaagggaacataggcaattagcaagtggaaaactaaagagaaaataattagagcctttttaaagtgctaggaagaaaataatgggagctgtattggggagtaatgatctactctagctaggtccaagacacaagctcaggggagatgacattgcactgaggccacctcaaaaccactcgtcagataaaaattagcaatcagtaaatgtatatgtttatagaagagtaagtatcgcttttagtggtgatgcatttaatctttttgtatagttctgcccctgtttgcattcctttgtccttttatagcctctctttggcatctagggccatccagagcctttttattacaaaacatacagacactgttttcagactgtgtacttactcttccaaatcaatttctggcaccgtatctcatggctcatttgctacaaaagtaaggtgattttagttaacataggaagaatttcaggacaggaatatgccccattttctattccgtggtacatttgattgagtaaactgaatttaaacagaaggcacctgcccggcaagcaaggtgacctctcttgggtgaattaaatcatgtctcatgttgcttaaaagatgtgactctagagaaaggttgagagggacagaagtcattgcacagtttactcttccattttctatttgtattaatcttttaagataatacaacagaatccttaactaaataaaattattggaaggccttaataaaattattggaagctttctttaaagttggctcattatattttttgtactgtaaactagttggtaaatgtaatttcattataattttgtttaatgactgggttgatattatgattcatcactcatttacttaattagtaacacttgactttatgtaccaaaaatgttcaatttgcacactgatatttttcagttaaataaaattatgtttggggaagatgaagctttttttctatttttgaagcatgcttttcagtattgttcttgattatcaccaaatataagccatcagcaagagtagtaagatgagtttgctgctaatatgtagcagagaggacaatagtagtttggcttggactagaactgtctggcttcaaattatggtgctttgaaagatactttaactttctgtgtttgtatcctcatctttatctttaaattgatacctctctcatactatgtaccatagtaactacctctagtgtgagagaatgaatttaaaatccacttagtgtgattttaatattaatgttattattaccacttattttagaatttgtaggaacgaagagtgatttttagaggtcatgactctagtcttctgctctaaggaaaaacttccctagtccatttctgattaatttcatggttctcaacttagttaatgagttcaaccctgcatgcaaagctgtggacaagggcattcccaaagtcacaggctaataatggaggcacatttgtggcacatcatttttgcttcagtatttgggagaattaaaagtgtgtgtacgtattaaaagcagcataatgatattatgcagtaacatgcaaaatttgcatgaatttttaaagtactagacgaggctttaaaaatcatttacatttacagagggaaacttaagatggcaccaccaagacccgaggatcatttgcttttgtcattctagagacttaactggaaatgtctgagaaatactagagaaactgatgggctagttacctgttgtaaatgttgtttctgtaagaaaattccaggattttcctcagccgtcccttttatcttctagcatttttaggtagtgagggtggaggagttaatgatattatgtaagccatctggtgcagctaataaaattctaaggtgactgcaagttggtttgaggttcagagtcatctggctgtttgggagacggtctcagtcctggcttgtggaatgccactattgcttcattcttgcatctctcatatgaacagcgtgtcacctttttcttttttcaatactcttcttcccaggccctatactttcctacaagctgcaatggccagccggagtgtttctctgaaccttatgcacaactgtatacatgcagttgtctcatcatatcctctcaactgtctcaaggtatctttaagaataaaattaataaatggcacttccatccttttatttccacactccacaaatctcagagtcattctggctacctgccacaccctcaggacttcccttccctgtcatccattttatcagcagcttatttctattttatctgctgaatatatctggcatttgttcattttccttccttcctgctgtcacccctccttgcctatctcccatcatttcctccccttcctcccactggacagttgggctctacctattgctccagcctccttgtgcttggcctttactcttggcgctcctgcctcttatcaggctttcagatccattctatgccaggctctctctagacacagtgatacctccttcacatggtgaactcttagccctcctctgggcttttggcattttctcttccagtccaaggatggttatcttgcttttcacttatttccaattataattatccactgattatacacaatggcaccatttaattattgtctctttctttcactaggctgtggattccataaaatcaagtcttctttttcacagttatagccccaacacctagaacaacagttatttctgactaaatgaacagatgatttaccatattatctgttccggatggaaagggaagtaaaatattagcatatcctccactagtctactggactgaatttctgttcttaagtggaaaaagcatcttttggccctgatgtcaagctcaaagttgcttggatcaaatgatgttgggtattgagtggcaagctaaggagtttaaactttgtactggaagcattggggagctactgtaggtgggaagcccccagcttaatggtctcaaaccttcacttccctggcaggataaaggtaaatgtgtgttgcatactttgccaagaccaggaagtccaccgggtccttgagagagggagggactgctcggggatgggaacacgtaaaaaaaaattcactcactacaattgcattaacaggacagggtcaaaggtcatatttccaggttccatggccaacgctaggttctttttactcacagctgactaaataataattaggaggaagctgatgaaaataagcaccaatgattgtttttttttcccctctgtgccagattctatgccaagcacttatgtgaagtagatagtattactaatcctattttatgcatgaagaaagaggttgaggttacataacttggtggaggccctacaagaactaagtggctcaattcaggtctgactaatcctaaagcttgggcttctggctgccaataaatcacagtaggacaaatgttaataagacaaaatgttattaataatagcatcttttttatatgctagacaacagctcagggatgcacatttgttttctccttttgctcctaagagccaggtaagaaaacactagttgctaggttcctcagaggactgagaattctgtagctccactggccaacatcccttgggtcctaaatgttcagttataataataataaactggaaacaatataaatagagaatggaaagggaccctgaggaaagattgggcatgatttcattgtactcctaaaacttttctcatatgcttttgtgcccagtagtgtttattctgtaatgagtccttaatatacctcaatagtcatagagaaaccccttttgctctctagtggctgtatgggaccgtggtaataatagttgctcttgtttatttcctgtttgatgtgttttgatgcaacagactattcagctcagacagagaccgtgtgctgcaggtgaggaacacaggctttggagtctgaattcaaatgcaacttctactgcttacagcgatagcaacccagggatgtttcttcgacttgcttccttcatttattcctcaaatgtttatcgagcatccgctgtatatcatgtgttatgttagaggctggggttacaatgggggcaaagatagacatggtcctggctctagtgactcttacagttcaattcaagagagatgtcaaataaacaaatgagtttgtggtaagcttaatgacagagaggtacctagaacatagaactaggaaataacccaggtgtggggggctttctaaggtaacctaactaagagttaggaacaaagctctcagcatggtgcttagcacatactaagtaaatgatagttactacatggtaaattttcccagagaaagaaccatagacacaactttatttagtggaaagtgactaatatggttgacttttgtcagtatttggattttatattgtataatataactctatgatcttgtttatttatttttcctagaaagaaatgaagtcaaaatagttgcttggaagaattgttcaaagatgccagacatggtggctcatacctataattccagcactttgggatgcccaggtggcaagatcacttgagcccaggagtttgagagcagcctgggcaacacagtgagaccccatctctacaaaaattaaaaataaaaacattagtcagtcttggtggtgcacgcctgtagtcccagttacttggggtgctgagatgggaggatctcttgagcttgggaagtcaaggcagcagtaagccatgatcataccactgcactccagcccagataagagagaaagactctgtctcaaacaaacaaacaaacaaataaacacacacagtgttcaaagataggccatgaatgaagacatctaaacacagccatcttgttccatagttagttccaagataaagtcaaacagaaacaactagaagccttggaggcactgtttgtttggtaaattttgattcatggtctcattaatgcctcatcagcctcttgaccgttagtctgttcaggtagctctgtgtggggatcttcattctctggtagccaagataggattgtcctaatgatgactggttttagtgtctccataaccactggtccctgaatataaagcgctatgcatagctaaacaaattcttattgccttcagcctgtgtgcaatttagcagcaagatatttcatatctcacagcattcactagtcctactcaattaggaactgcttgcaaatcagaacagctgatgatcataatgactcaagtggacatgtttgccctgaaaaggaaaagaaaatattgaaaagacatttcaattgtcattgaataactcagaaagggaccagggtgttgtcaggggaaatatattgtcattggccttcctgactgcggaacttccctataggttatgacaatacagctgggacacaccagaagggccaatgtgagaaataagaacttgaaactggggccgcctgtctttctgggggtggtctcctgtcccatttttagttatacccatattcccaggcacagattttcattttagaaaaaaaaaaaaaaattaaggcagtggtgatagagtgctaaagcagctttttattgaacaaaaataaaagcacccgaattattccgcataccttcagtgataagcttacatgaatgtactgcataatatatactgcttaagggcatggactttgaagtcagacagtgaaattttggccccgccacctcctagctgttaacttgaagcaagttacttaactgctctgagtctgtgtttcctgatctataaaaaggggtatctgtggttacctcaaaggctgttgaaaaactgaatgtgcccatgcctgcaaagcaccacgcatagaggctggcaagtactgagtgctaagtaactgttgactgatttgtgagttcagttttgactcagtttctgacttctgctggctagaacttataactacattaagacacccacctggttaaaaaggtagaagactcaaattatatacgtgcacatacgtacatatgtatctgcttaggatatagtaagacctcaatcaatattagtttctttccagttccagtcatgttggtattaaattagtatgacaaccaaggctgaactgggcaaatgtgaaatagatctatcacagtaattattatcatttgtattactttagaatttaaaaagctctttcaacatgcattgctttagtaagtccttacaacagctggggaggtgtggaagtgtttttttatttgtccatatattctttcctccacgcagcaaatgcacgtgagtgcctgtgatgtgtcaggtactctgctcatcctgggaaaccaaatagatgtcctcacagccctgtcttggtgatcctccaaatgtatgtcctaagataccaaaaggtggtatagacaaggtagttatttccagtgattaatgttttatagatgaaaaaaaatgagattcagtgtggcttgtaagtgacagagccagatctcaagctccaaatcccaagtcttttccactggatcccatgcctgcctgcctgaatgtatcatttggaataaatgctagagagagcctggtgtagccattcattttacagattaaaggcaccgaggcttaaagtgggtaaatgatatgctcaagaccatctctgctttaggggtagctatcagttccaatgaggaaaccttttgacagcatgctaaatcttagaatgtatatagcttattctgcactaatgtaatagctgcattttaataaattgtgtgttatcaaaaattcagtataaaatgtttgtttcgggggccatagttaaggggcgctggagagtttcagactgaaaaatcaaagttacttgttttcctagcaagaacttaagaaataggaatattgttttatagcggtaaaacctaaatgccactgagcaaatccagcacttgataaaatctagctttttttcaagagtaaagaactttcactttctatcacaccagcactatcattatgtgtttagacctttgtcacccagttacaggagacagagctcaaagcactcaaacaaagcagctgtattttgtagatgcagagccttcttccttctgtggtgtggtgctagttctcagtgacggatgagtttttagtaaagagttggtcagcctgctctgggccagatcctattctaggcagaagaatgagtagaacagaccatgcccctatgcaaatggagcttattttctattggaagacagatagtgacgaaaagaaggaaaaaaggaatggagggaggaaaggaaggaaggatattgggttagaaagtgataaatgccatgaggaattatcaaacaaggtaaggagaattagagggagagggtggaggtgggggctggcttgtgtgctgccttagatcaagtgatctagcagggcctctcatggccacattgaagatgtgactggagtaaggaagaagccatatggcaccttggagtaaaagtctcccaggcaaaggcagcagcaagggaaaaggtcttgggatggaaacatagcaggcctgtttgaggaaagcatggaggcctgtgggctggaaggaagagtacaaagcagggcaagagaaaagcggcctgagagacagttgggaacaagagcgtgagggaccttgtgggactttactctgggtgagataggaaggtactagaggtttttggccagaggagggatgttacctgacttaggttttagcaggctcctaagtagagatagacagtccaggatcacaggcagaagctgagactgttggggaattattgtagcccttcttgccaagacttggtggtggcttgattttggaggtcagggtagagctggcaagaaatggttggattatcatggatggtatggttggatggcaagaagtggctgttaatcttttgaaggttgtcctaaaaggatttggtggtggactccaaggtgtttggcctgaacaactagaagaagagagccactatttttgagcactttatttgtgggctcaggtatgtgtttgtgtgaaagactaaggtacactaatggaggtggttccttcaagtgagagtgtgtagaaatgccttatgacattgcttatgacattgtagaaattcctaatgacactgttgtgctgaacacctatcaacttcagtggggatggcaccaggttcaagaggctgaagaagagacccagagacaggaaacgtgacatgggcttttactgggggcttacatacaggggagagagtccagtggcagtgggctggacaggagaaccaggcaacttgcaaaaaacatgcagtttatatggcatatttacttagcactctccctgtgacagtctctacctggcaaccttcacttaaccccaaacaaagggccttgattccctatacagccatgttccattggacaggccaggggctcagatgttccttatagattaggaacaactctctgggttggccattcttggattcttagcttgggacacctaaccacattcaagtgcatctgccatacagggttattcttagggtatgcttaagttattgctatcaggtgtgtttgccatacacacatgttcagatacaaatgtgggtgggattataaaacctgtccttttcttcatacatgccttctgcccctcccctctatacacttaacagcatttcttcttagccattccctacctccaataaaatgttcacttggaagaagaccagtcatttaggacttagtgtgattttaagtcagtatgatacctttgctagatatatttacatttaaacctaactttgcactctatgatggcacatagatttagtcttttaggctaactttaatcactaaagttgcttgcccagagaactgtgctgaaaaagtttgtgaagctggttctgggctcagcaggaaagaggaaaccttaatcatatctgccattatagggactgagagtggcatatcatatgtgcatagtatttgatagcctagctatggctgccacacccacacaaaatactttttgtcctatcctttccctcttggaggaagttttggcaatagcaaatagaggaaatattttccttttttactttcttgaggcccgcttgccttgtgacacagggagaccactggcccaaagatcagactgtaatatctaaaggccttgatgaattatgtgatacaaaactcaagtgctctaggagataggtcctttaccttaatgggtaatgcctttgccaggtcataggctattttttctctagcattcatcactgccaaacatactgtaattaacattcatttattatgtgtactgtttctctgcttcaccagaatgtgagccacagggcaaagactttgctctgtgttgttcagtgctatttccccagtgcccaaacagtggctctaggaagtaagtgttgagtgaatgttgaatgaataataataatagtaagttgcagcctagagttaggataaatgattacttaaggtagcagcacttttttttgaaagcagaaagctcctgttgtaacaaaaatcactgtagctgtatgggttagtgaacattattaataattagagtgataatgaagatgataataataagagatttctcaaaagaagagatatgaatggccaagtatatgaaaaaaatgcttaatatccctaattatcaggggactataaattcaagtcacaataaaatgtcacctcacacttgttagaatggtttgttagatcaagtttagcctaagctgcctccttacatattttaagttcagcctaaaggtttttccgtacatcgtgaactataacaagcggaggtataaacaaaccatagcctacccttgtgccaatcactgacttttggccaatcaaatgtagccaactgtttgaactctgttcaaataaggcaagcgcccagctgcaaccaatccagctgtttctgtattttacttccattttctgtacatcactttcctttttctgtccataaatcttcttctaccacgcagctgcactggagtctctgagcctgctctggctcagaaggctgcccgattcacaaactgttcattgctcaattaaactcctttaaatttaatttggctgaagtttttctttatcaggctattatcagaaagacaaaagataataagtgttgctgagctgtagagaaaaagcaacccatgtacactgttggtgagaatgtacattagtacagccattatagaaaacagtatgaacttcctcaaaaaattagaaccaccatatgattccagaatcccactagtgtgtagttatccaaaggaaataaaataagtcttctaaggatatctgcactcccatgtttattgtagcattattcataatagctaagattcagaatcaacctaagtgtccatcaatatatgatggataaagaaaatgtgatatacatacaccctggaaaattattcagccttaataaaagaagggaatcctgttattggagacaaactggtgaaactggaggacattatactaagtgaaataagccaggcacagaaagacaaatactgcatgatctcacttacatgcgaaattttaaacagtcaaactcatagaggcagagaataaaatggtggttaccaggagttggcgcggagggtgggcagttggagaattgttggtcaaaggatacaaaatttcagttatgggaggaatgaattaaagagatctattgtacaacataatgactatggttaataaccatgtattattttcttgaaaagcactacagaataaattttaagtgttctcactataaaaaatgatgtgatgggccaggcatggtggttcatgcctgtaatcccagcactttgggaggccgaggtgggcagatcacaaggtcaggagtttgagaccagcctgtccgatatgatgaaaccctatctctactaaaaatacaaaaattagccaggcgtggtggctcatgccggtagtcccagctattcagaaggctgaggcagaagaatcacttggacccaggaggtggaggttgcagtgagctgacatgcgccacttcactccagcctgggcgacagagcgagactccatctcaaaaaacaaacaaacaaacaaacaaaaagatgtgatgaatgcatatgttaattcactcaatgtagccatttaacaatgcatacatattttaaaatatgttgtacctgataaatatatacaatttttatttgtctattaaaaaattaattaattaaaaaagccaagctcatagaagcagagagtagaatgatggttgttgccaagggctgggaggaggtgggggaatagggagatgctggtaaaacatacagttttaattagagcggaggaagttctggagatctattttatagcatggtaactacagttaataataataatgcattgtacacttgaaattgctaagagaatagatcttaagtgttctcaccacacacacaaatcataactgggcagtaatggacatgataattaatttgattgtggcaatcatttcacaatgtatacatatattaaaacaaacaaacaaaataataataattgtaatagctctttaaagcccttatatgtgcctgaccctcaactaagtgcctgatgctcattatctcccttgtgaagtaggtccttgtttgtcaagtgtagaaattcaggctctcagtgacttgtccaaggatacaatgctaataatcagggggttccaaagctgaaaagaaaacattaagacctctctatacaggaggcttggccttttatctgctaagttggatcattctctttagagccatttaaaaccattggaaaaagaaagaacttctgggcaaatgagaggtttggctgccttttaccattgtaaaaatgcaacagttgctggaggctgaaagcgtctttgaattgattcatttgttttgtttattctgcaattctccagtaggaaagaaccagaccttttctgcacaaataacttttcccaaattatgttgataggctggttgtgaaggatcccaagtgagtataagggtaaagaagaaaggagaatctaaaaaccttcacacccaaatccaggcttttgaggaaaaataggtggttgggatgggaagagctggggttcagggagagttgatcccagacttttttgctttgggccaaatatgcagaccactttttttttattattattattttaatttaaaaaagtcactcacttttatttacttatattcacatatcaaacagaatttgcagactctcaccatgaatgtaagagcagcattactgaccataaatagaaagtaataatagacttagtgaaaataaagcaatgccatttcctgttttaaaattaaaacaatacaagtaccccagagttacagcacacagtccatgagttggaagctgagtgttggccccctaaaattttccagaaacgaagccagtggggcaaatccatcttgtaccacaatgaaaccctcaaggtcatcaaagaggttaaaagaaaaaaaaagcatccaaaggtcagcaacctcaaagattaaaggtagataagcccacaaagatgagagagaatcagcacaagaatcctgaaaactcaaaaaaccagagtgccttcttttctccagacaatcacatcacttctccagtaagggttctgaaccaggttgagatggctgaaataacagaaacagagttcaaaatacggataggaatgaaaatcattgagctacaggagtacattgaaactcaatacaaggaagctaaaaatcatgataaaacaattcagtaggtgacagaaaaaatagtcaatatagaaaagaatgtaattgacctcatagagctgaaaaatacactatagtaatttcataatgcaatcacaagtattaatagtagaatagaccaagcagaggaaacaatttcagagtttgaagactggctttctgaaacaagacagtcagataatagagaaaaaagaatgagaaagaatgaacaaaacctctgagaaatatgggattatgtgaagagaccaaatctgtgattctttggtatctctgaaagagatggggagaatggaaccaatttggaaaacatatttcaggatatcattcatgagaatgtccccaacttagctagacaggccaacattgaaatttaggaaatacagagaaccccagtaagatacttcacaagaagatcatccccaaaacacataatcgtcagattctccatggttgaaatgacagaaaaaatgttaaaggcagctagagagaaaggtcagctcacctacaaagggaagttcatcagagtaacagcagacctcttagcagaaaccctacaagccagaagagactgggggccaatgttcaacagttttaaagaaaagaaattctaatccagaatttcatatccagccaaactaagcttcataaacgaaggagaaataagatccttttcagacaagcaaatgctgagagaattcactaccagcagacctgccttacaagatctcctgaaggaagcactaaatacgggaagaatggatggctaccagccactacaaaaacatggtgaagtatacagaccagtgacactataaaacaaccacataaacaagtctgcaaaataaccagctaacatcatgatgacaggatcaaatccacaattatcaatactaaccttaaatgtaaatggactaaatgccccaattaaaagacacagacgggaaaattggataaagagccaagactcatcagtgtgctgtattcaggagacccatctcatgtgcaaagacacacataggcttaaaataaagggatggaggaagatctaccaaacaaatggaaagaaaaaaaaaaaagaaaaaaaagcaggggttgaaatcctagtctctgataaaacagactttaaaccaacaaagatcaaaagagacaaagaaagccattacataatggcaaaggaatcaattcaacaagaagagctaactctcctaaatatatatgcacccaatacaggagcacccagattcataaagcaagtcctcagagacctacaaagagacatagactcccacacaataagactgggagactttaacaccccactgtcaatattagacagatcaatgagatggaaggttaacaaggatatccaggacctgaactcagctctgcaacaagcagacctaatagacatctacagaactctccactccaaatcaacagaatatacattcttctcagcaccacattgcatgtattctaaaattgaccacaaagttggaagtaaagcactcctcagcaaaggtaaaagaaaaggaatcacagcaaactgtctctcagaccacagtgcaatcaaattagaactcaggattaagaaactcactgaaagccgcacaaccacatggaaactgaacaaccagctcctgaatgactactgggtaaataatgaaatgaaggcagaaataaagatgttctttgaaaccaatgagaacaaagacacaatgtagcagaatctctgggacacatttaaagcagtgtgtagagtgaaatttatagcactaaatgcccacaacacaaagcaggaaagatataaaattgacactctaacatcacaattaaaagaactagagaagcaagagcaaacacattcaaaagctggcagaaggcaagaaataacgaagatcagagcagaactgaaagagatagagacacaaaaagcccttcaaaaaatcaatgaatccaggagctggttttttgaaaagatcaacaaaattgatagaccactagcaagactaataaagaagaaaagagaggagaatcaaatagatgcaataaaaaatgataaaggggatatcaccactgatcccacagaaatacaaactaccatcagagagtactataaacacctctatgcaaataaactagaaaatctagaagaaatggataaattcctggacacatacaccctcccaagactaaaccaggaaaaagttgaatctccaaatacaccaataacaggctctgaaattaaggcaataatgaatagcctaccaaccaaaaaagtccaggactagaaagattcacagccaaattctaccagagatacaaagaggagctggtaccattccttctgcaactattccattcaatagaaaaagagggaatcctccctaactcattttatgaggccaacatcatcctgataccaaagcctggaagagacacaacaaaaaaagagaattttagaccaatatccctaatgaacatcgatgcagaaatcctcaataaaatactggcaaaccaaatccatcaacacatcaaaaagcctatccaccatgatcaagtcggcttcaccctaggatgtaaggctggttcaacatacgcaaatcaataaacgtaatccatcacataaacagaaccaaagacaaaaaccacatgattatctcagtagatgcagaaaaggtctttgacaaaattcaacagcccttcatgctaaaaactctgaataaactaggtattaatggaacgtatctcaaaataataagaactatttatgacaaacccgcagccaatatcatactgaatggataaaaactggaagcattccctttgaaaactggcacaagacaaggatgccctctctcaccactcctattcaatatagtgttggaagttctggccagggcaataaggcaagataaagaaataaagggtatttgattaggaaatgaggaagtccagttgtccctgtttgcagatgacatgattgtatgtttagaaaaccccattgtctcagctcaaaatctccttaagctgataagcaacttcagcaaagtctcaggatagaaaatcaatgcgcaaaaatcacaagcattcctacacaccattatcagacaaacagagagctaaatcataagtgaactcccattcacaattgctatgaagagaataaaatacctaggaatccaacttacaagggatgtgaattacctcttcaaggagaactaccaaccactgctcaacaaaataaaagaggacacaaacaaatggaagaatattccatgctcatggataggaagaatcaataccattaaaatgcccatcctgcccaaagtaatttatagattcaatgccatccccatcaagctaccagtgactttcttcatagaattggaaaaaactaaagttcatatggaaccaaaaaagagcctgcattgccaagacaatcctaagcaaaagaacaaagctggaggcatcctgctacctgacttcaaactatactacaagactgcagtaaccaaaacatcacggtactggcaccaaaacagagagatagaccaacggaatagaacagagccccagaaataacaccacacatctacaaccatctgatctttgacacacctgacaaaatcaagaaatggggaaaggattccctatttaataaatggtgctgggaaaactggctagccatatgtagaaagctgaaactggatcccttccttacaccttatacaaaaattaattcaagatggattaaagacttaaatgttagacctaaaaccataaaaaccctagaagaaaacctaggcgatagtattcaggtcataggcatgggcaaagagtttcatgactaaaacaccaaaagcaatggcaacaaaagccaaaactgacaaatgcgatctaattaaactaaagtgcttctgcacagcaaaagaaactaccttcagagtaaaccagcaacctgtagaatgggggaaattttttgcaatctattcatctgacaaagggctaatatccagaatctacaaagaactcaaacaaatttacaggaaaagccaaacaaacccatcaaaaagtgggcaaaggatatgaacagacacttctcaaaagaagacatctatgcagtcagcagacacatgaaaaaatgctcatcatcactggtcgttagaaaaatgcaaatcaaaaccacgatgagatacgatcttatgccagttagaatggcaattattaaaaagtcaggaacaacagatgctggaaaggatgtggagaaatagaaatgcttttacactattggtgggagtgtaaattagttcaaccaatgtggaagacagtgtggcaattcctcaattatctagaactagaattaccatttgacccagcaatcccattactgggtatatacccaaaggattataaatcatgctactataaagacatatgcacatgtatgtgtattgcagcactattcacaatagcaaagacttcgaaccaacccaaatgcccatcaatgatagactggataaggaaaatgtggcacatatacaccatggaatactatgcagccataaaaaaggataatttcatgtcctttgtagggacatggatgaagctggaaaccgtcattctcagcaaactattacaaggacagaaaaccggacaccgcatgttctcactcataggtgggaattgaacaatgagatcatttggacacagggcagggaacatcacacactgggtcctgtcggggggtgtggggctgggagagggatagcattaggagaaatacctaatgtacatgatgagttgatgggtgcagcaaaccaacatggcacatgtatacctatgtatcaaacctgcacattgtgcacatgtaccctagaacttaaaatataataaaaaaaagaaaagatgctcagcgttatctgtcattagggaaatagaaatcaaaaccacaatatgacaccacttcacacccactaaaccagacaacaataacaagcatcagcaaggattcgggaaccttcatacattcctggtgtaaaatttaatacttgtagaattgttcaattacttggataaaaaaagatcaaggaatccagagctgttttttgaaagaattattaataataaaatagaccactagctagactaataaagaagaaaagagagaagattcaaataagcacaatcagaaatcacaaggaggatattatcactgaccccaccgaaatacaaataactatcagagtatattataaacacctctatgcagataagctagaaaatctagaagaaatgaataaattcctagacacgttcacccacccaagactgaatcaggaagaaactgaaacctagaacagaccaatagggagctctgaaatttagacaataataaatagcctaccaaccaaaaaaagcccaggaccagatggattcacagctaaattttaccagatgtacagagaagagctggtagcattcctgctgaagctattccaaaaaattgaggagggactcctccctaactcattctatgaggccagcagcatcctgatatcaaaacctgacagagatacaacaaaaaaaaactgcaggccaatatccttgatgaatattgatgcaaaaatctttgacctaatgctagcaaaccgaatccagcaacacatcaaaaagcttactccctgtgattaagtaacctttatccctgggatgcaaagttagttcaacatatgcaaatccataaatgttattcatcacataaacataactaaagacaaaaactgcatgattatctcaatagatgtagaaaaggcttttgataaaatttaatacccatttatgttaaaaaactctcactaaactccttattggaggaacatacctcaaaataataagagccacctatggcaaacagacagccaacatcatactaaatgggcaaagctggaagcattcccactgaaaatcagcataagacaacgatgccctctctcaccacatccattcaacatagtgttagaagtcctggccagggcaatcaggcaagataaagaaataaagtgcattcaaatgcaggtgacataatcttatatctagaaaaccccatcgtctcagcctaaaagcttcttaagcttataaacaacttcagcaaagtctcaggatgcaaaatccatgtgcaaaaatcacaaacattcctatataccaacaatagtcaagccgagagccaaatcagtaacatagtcacattcataattgccacagaagaataaaatacctaggaatccagcaaactagggaggtgaaagatctccacaaggggaactacaaaattctgctcaaagaaatcagagatgacacagacaaatggaaaaacattccatgctcatggataggaagaataaatatcatgcaaatggccatatggcccttaacagtttatagaaattcagtgttattcctattaatctaccattgagattcttcacggaactagaaacaaactattttaaaattcatatggaagcagaaaagagcccaagagccaaggcaatcccaagctaaaagaacaaaactggaggcatcatgctacccaatttcaaactgtactacgaggctacagtgaccaaaacagcatggctctggtacaaagacaaacacatagcccaatggaacagattagagaacccagaaataaggctgtacacctacaaccatctgatcttcgataaacctgacaaaaacaagcaatggggaaaggattccctattcaataaatggtactgggttaagctgctagccatatgcagaagattaaaactgaaccccttccttatatcatatacaaaaattaactcgagatagcttaaagacttaaatgtaaaaccccaaactataaaaaccctggaaatcaactaggcaataccattaaggacataggaacaggcaaagatttaatgacaaacatgctaaaagtaattgcaacaaaagcaaaaattgacaaatgagatctaattaaactaaggagcttctgcacagtaaaggaaactaccaacagagtgaatagacaacctacagaatgggagaaaatttttgcaaactatgcatctaacaaagatctaatatccagcatatataaggaacttaaacaaatttacaagagaaaaacaaccccattaaaaagtgggcaaaggacatgaacaaacacttttcaaaagaagacatacatgtggccaacaaaaatctgaaaaaaaagctcaacatcactgatcattagagaaatgcaaatcaaaaccacaatgagatacagtctcacaccagtcaaaatggctattattaaaaagtcaaaaagtagcagatgctggtcagggtgtggaaaaaaaggaatgcttatgcactgttggtgggagtgtaaattagttcaaccattgtggaagacagtgtgacgattccttaaagacctaaaagcagaactaccattcaacccagcaatcccattactgggtatttatatacccaaaggaatataaatcattctattataaagacacatgcatgtgtatattcattgcagcagtatttacaatagcaaagacatggaatcaatctaaatgtccatcaatgatagactggataaagaacatgtggtacatgtttgcgcttcccgggtgaggcgatgccttgccctgcttcggctctcgctcagtggactgcacccactgtcctgcacccactgtctgacatgccccagtgagatgaacccgatacctcagttggaaatgcagaaatcatccatcttctgcatcgctcacgctgggaggtacagactggagctgttcctattcggccatcttggaatcgcccccgtctttttttttttttttttttttgagattgagtctcactctgttgcctaggctgaagtgcattggtgcaatctcagttcacagcagcctccccctcccaggtttgatcgattctcctgcctcagccttcggcgtagctggctgtaatttttgtagtagagacggggtttcaccatgttggccaggctggtcttgaactcctgacctcaggtgttgcacctgccttggcctcccaaagtgctgggattacaggtgtgagctgccgctcccggcctcttttttccagctcacttttcccaaccccttcagttgaggcctgagtgctgccaatttagaaaaagatggcatctggctaagtctatgctcttctagcacaaagcatgaacatctacttttgtcaggcattgctacctcactatcaatgaggtggctgtaccagaataaagccttctggctcaacaccctagagagtaaagcagcccaggcttcctccacaggaaacccagacagttgttcatccatattaccttaaggcattttccattccacaagtggaaaacactgccctagatccatcccctacctctctgttctctgtgtccccggctggacattgcttgaaacaactattatagggtgagttggttcaatcttgcctaactgtgtcccaggactcttatcattctgccaccagaaagttcatatgctcaaaattggtccttaggaccactgaccttagcactctccctctgtgagggtacaatttaggaataacttttgttggtgaaattgtggcaggaactttgtgcctgtgtcacacaatcaattagacactttgcaaggtagaggcattattattatcacaagcagatggtgaaatgttactccatccttctgtgcctgctgtaacttccttgcacagcatcatttagggtgtttctttgcaaattgcagtttgtttgagaaagatttaaagccctgagggtttggtgaaaagctcttggttatgagtgcatctactttgtctgtcagtagcaaaaagggcacctctgattaatactgactttgccctgcaagtcaggtagagtgcagatgaggtccttttttcttcactactattctagggtaagagaaacttggaagatcatctgcctgtggcctctagaagaaggttaagtgagcgttgagccaggaatggaggcatttcttgtaatgaacttctctatagaacaagatagcaaatctgttacccagaattctagagggctgcttccagaagaaaggtattcaggccaggctctctgccttgcaggagtgataccctgaagagaggggacaggtgtcatgagcacagtaaatgtggtggcagcgaaaaagcagaatggcactgagggcatcctgggtggggataggttagaatgagagatagggaaagatgaatttttttttttaaaacagatgctttaaggttggggcaatggatgggtgaggaagaattttaggctgtgctgctgtgcaatgcactggcaaatgcctacagagtcattcttcgtggatatgttattgggcagatgcaagtctcaaggcaaccctgctttatttgggttacctgtgcataaaatcctgtttgcacaggttctgagaggaatgaaggagattgaaaaggcccttgcggagtctgtatcttatatgtaggtgagacaggcttagaattgttccatagtaatgcacagtcaagcacaacatcatgtttgtggaaatcccagagggggccctgggaaatgtgtcagaggagaaagtttgaatgaggctttcttgtataaaaagaggttttgtgaccagattcacagctacttctgtccacttttcaacattgtatagatattattatacaaggcatgtctcagaattagtggatcctctggctgaactagtagtaaatggatagattaattgatgaatccctgccatttttctgatagtgtgtgccatacgtagttagagaaggctcaaaccttcaccaccatctgaatataatagtctttgcaaatacttccattgcagtatctaattcttagtcctcacatacagtggtctccccttattcacggttttgctttctgtggtttcagttaaccatggtcaactgtggtccaaaaatattaactataaaattccagaaataaacaatgtataaattttaaattgcacaccgtcctaagtagcatgatggaatctcatgctgtctcgctccattgtgaggaagtgaatcatccctttgtccagcatatgcactgtagatgctccctgtccattcatcacttaatcattatctcagttatcagatcaactgtcatggtatcatggtgcttgtgttcaaggaacccttgttttacttaataatggccccagcacaagagtagtaatgctggcatagtgttataattgctctattttatcattagctatcattgtcaatatcttactctgcctaatttataaattaaactttttcataggtatgcatgtgtaggagaaacatagtactgtttggtttcaggcatccactggggatcttgaagcatctgtcctgcggataaccagggacttctatactatgtgttgagtactgtgctgaataccatatgggaattgtctaattttattgctctaagattcttcttaggtggatattatgagcattccacctttgcatgtgagatgcaaagaagttattgttctgtcagttatgcaaggttgcacagacagtaagtggcagaggcagaattcaaactcccagatctgagttcataactatttccaaatactgtctccttcacattacaatgatatcttcagaaactctactgcatcctggttattactttatattgaaaactgtatacctctaacccagtgatgcgtcaccatttttggacccctcttcagagaaaaatacacacacacacacacacacacttggttgcattcatacatgtatatatgtgcatatgtgtaattttttctttttaatttcagaggttttaaggatcccaagttgaggacacctaacctacagggaaaactcatttgaacttggagtctagttgctgtttacttccttatgagggcactaattcttgctgatattaacaaaccctttcaagtatttccagtgtagcagagtcaaacttcaaacctggctgttggtctaatatataacaagactagtaaccatttatttattacgtgtacctaactcttagggttgacagtgggtatacacactggtgaagtcctactggttatacgcagtgggcatctgtaatgatttggtcaggggtgaatatcatgcctgctaacaactttttgaggtaggtgatgttacatattatgcccgttgttcaaatgagaatcctcaggctcagagcacttcctcaatagcttacatgtggcagatgcctgtcaatctaatttcaaatctgctctgatctactttcctatcccggctttgaatgtacctttccttccaaatctgttacaggttctgcattacatcacattgctttctctttctcaatctctttctgtttctcaaccttggcattattggcattttggcttggataattctgttgtgggggcttgtcatctgtattgtaagagcttccctgtaagcagcatgcctggcctctacccactggatgccagaagcaccctctaccctccaggttttgacaatcacagatgtctccagaccttgccaaatgtcctctggtgagcaaaaatcactccctgttgagaactactgctttcttgctcttttgtatgctttctcagtctctctctctctctctccatacatagaattataaacgtttatcgttgtgtgctcattgtttgccagaaaaagtgtcaagacccttccatgcattatatcaagtcctcaaaacatcccaccacgttgtttacttcatttacagatgaggcgagacctgggtattttggcagattagtaagttgcttagagtcacacagctgctaagggtggaccacactgggatttgtcttagctctgtgtgccctcagggccctgggctttatgagaaatgttttcactgagctacagagttgtttagggcttcaaattaatcagactctgtatattttcattgtttgggatttgttcagctagtaagctggaagaaaattttaatgaaattgtaggtcatgtatttcgttattatttatttttattattcttacattcttgcttttattgtcaatcctttctcactaaaacatcatcatccacaaaaaaattaccaaaacaaaatgttgcctttgaccctaatttatgagcataaatatcatcttattgaacttaaaacataaaagagatttctttctaagagaacaaactatttctctaaatcatcttcagataactttttcaatgggtgctttatgtgcttcttaatagcacagattactactaaataacttgaacataaagacaataaattttctggaaattctaatacggaagttttttaacaaaataatttattgtcagcaagcagtatatatatatatatatttttaagggacatatatactttagagctctggggcctttttgcttttctcaaattgagttttaacaacaacttcaaaattaaaaacatgtattaaaagagtaattaccaaataggaaggatgatggagaagagggtgcaggcttaattgagcttgacgtagtgggtcgttgggatgtaatggtgtaagaaaaatagttcttggtatatgtacctgctcagtatctgtactcctcttctttgagttataaagtagatttttcccttggggaatagccttctccaccaaacacagtattattggagctgtcaaacaccttgccttccccaggccaagcagtggtcatgtgaccaaggcagtgcccaagtcccaaaccccacccccctacccccaccccaccactctttttttttcagagattctgaatcttgagtacattgacccaaggatggaaaatggttgttgctgattcttcctgctgatagtagcctgaagaactaactgaccatgaattcctgggagcctgactcctgttgcttctttttttttttttttttttttttttttagacaaggtctctctgttgcccaggctggagcacagtggcatgatcatgggtcactgtagcctcaacctcccagactcaaacaattctcccatctcaacctccctagtaactgggactacaggtgggtgccactacgcccagctaaatttttgtagagactgggttttgccatggtgtccaggctcgtctcaaactcctgggctcaagtgatccctctgcctcggcctcccaaagtgctaagattacaggtgtgaaccactgcccccagcctcctgttggttctaagcttcatttagttttactttgatttttaggcactattctgtatacttgcagtagatctcttttctattttgctaacgttaggcaggatgatctgcgttgcttgaccccaaagaaccttaactaatacgttgatttgatgttaatagtggtgatgatgaggacgagtaggaggaggacaacaatagtaacagcagctgacatagattgattatctaatttaatcttatgaggtagatattgatatatgctcccattttacagatgaagaagacttaggaaggttacgtgtcttgccttcttagattaataagaggcaaatccaggattggaatccaagtatgttttgagagcccaaactcctaattgcttcactgattggcatgtagggaggatgtaccaaaagcatacattcatgttaggtctattttttacttaataccttatttttttatcgcaagagtgggaccatttctcttccatgtgttccttgatacaaaaccagctgcaaaatgttaagtgcatattttttcttgtctttatgtggtaaattagaataattattgttagttaagggatgtgaacgagatgtctttatcaaccacgaagttaaatggagtttctgtttttaaaccacagaagataatgctgtcttgacagattgtgagtgacagaaagaaaagtgtttccagcaggatccaaatggagatgttgcaggagaaagcataaacagcagaatcagaaagctctgggggttttgtatggagtgatgtcatcaatttttactcttttggtgcctgacaataaaataacttggtaccttcaaatttttcctattgattttaacaagggtgacaaaaaaggggaaaaacgttatttttgtttatctttagacagtccttagatataattctaaacatatatcatccctttccctcttgtgattgttgatgcctctatctatttgttcatatccttctctctttatctctacacacacacattcacagccacacatgcatatgtactttttctcccaaacacagccgcccagtaaaattgacacccactgggaggcccatggcatttggaatttggcccattgactccgtggtgaatttggataaacatctctaaagcaaagctctctcttttttcatgtaatataaatccctgtgagactagaaatccgttcaaattctatatcatttcagaccatccctacaaaggcagaagccttggggaaaatcctcttgggaggtgctccactccttgcatacacagttgaaatatggataaaatgaacaacaaaagcaactttcataacaatccttggtcataaacatgggttcttggaattttgaaaatgtcttaagaatcacctattcaaatgattctcacactttgagactggtacaatttcccccctaaaacaaagggctgactttactttgtcaccttgaagttttgccccaaaaaagggcatgaatgaagaaaactatcattcactattttggggggctattttgatactaaaaggatgaaaggcataatcttggaattaaaataattaaatatatatttagctttataaaaacctctttgattttggcatttcaccacgagtgaatgaaaacttcatcatgtattggcatgcgcttgttgattggcttttaggaaccactgattcagatcaatcttatctgatgcttgcttctctaaagatttctgcgaagggaatattccatttatacttgaatacctacagataagtggaactcattatttataaaaacagtctattctgtctttggataacactgttgaaagatttttcttatgtcaaattgaaatctctcttcttatagtttctactctttggttatggggggataatttggggctgaatagaataaaacttagtctctttacacacaatgagtctttgaaatgacaactgctatcctagtcccccttttcatctctccttgccccagagttcaagtcttctgtaaataggctcaatccctttaactatttcttttatgtgtttcaaacaaatatttacaattgtattcaatttttttttactgaagtatacatgctacaacatggatgagcattaaaaacatgctaagtacaataagccattacaaaaaaggtcacctattagaagattccatttatatgaaatgcctgaatgggcaaatccatagagattgaaagcagatgagtagctgccaggcactggaggaagaaggaatcggggaatgtatgcttaatgggtataggatttcccttggaggtgatgaaatgttttagacctagatacaggtagttgttccacaacattgtgaatgtacttaatgccacaaaactgtacacttaaaaatggttaaaatagtaaattttacgttacggatatcttaccacagtatgtatatattgagctgggaatggacctggtagtctgacacaagagccttctcaccccactttggatgccctatgccagttttccaaatgttgaataaatttttttccctgctcaaaaaaagtctgagtaccactggttcagtaaatattcccagtaggagacactgatgtaataataggctaagggaatatatactgatgtcagtaattccatgggaatcatttctacctccatcctaatcttctttttcttcctcttttgttgatattccccaatgtccatgactctcaaccatttcccacacttgcagtacttcacagatgactacttatttcggttttttccagcgcagccatacttgcagttttcatggtgtctttttggtaggtacaacagcataagataatgttcaagtagaatgcattcactgtattttgtagttcttcccagcattttgggtcactaaaaattcgtgttagagaagtagaaaggaattgtgaaatcaaagatagtagtcccattttggatacctgcataatatgaaaattttcttggcattggtgaatattaatattttatactccctcataaggttccttcattggctcctgttggagcacagtttccaatatattttctcccagattttgatgacttgccttgcaaaattttttgaagtttacatctatactttaaaaatttcacaaaggctctttatcttcatagaaagcaagggattcagcttcgatttgctaaattggctgtacaaggtagcatgttgttattctatttagaggacttgaaagcagactcactgattcaattatatttaatttgtaattagctccctcccaagcagctaatggtgcataacttggtcactgctattctggatgggcaaatagtagaacaaaatgacttcttttagagagagcccatcttagacagagtcccttctattatagtaatatttcttgggatgaccttccagttctaaaacaaaactcttttctgggcagtgtcccctgatccacagaggtgggctcccagcagctgagaccataatgtttgactttttaacttgagggcagagatgagtgatctagggctaggtatctgattatgccaatcagattctctcttctaagaattttgaattttgaattgaaagcaaaaagtagttattaatggtattttagtcattcaaatagcagtgctctagagggaggtctctaagatccggcctctcagttctctgaagctaccttgatttccttcttcacaaagcttgggttttcattctcctttcaattttgtgagatactgtagtattcttttcatttttcttatttttgaatagacttgctagggctggcctatatttcttgccaccaaacttacctagtacagaaatcaaagaaatgaagtctctaccaaatctaccaatgcaagtgataaaggctgtatctacttggtggaaatgaattacaacatgtaattttgtgcgtatgtgtgtgtgtacatctgtgtgtgtttgattgaattacttagcattttaccagatgctccagagccttattgtttttgtcatcattatcatcatgagcatcattgtcagtcatcacaatagctcttgtttatggaacactttttatgactcagcactgtattaagcactttgcatacaaaataacatttattttataattacaacaatattatcgaatggattctaccattatccccattttatagtttaggaagttgaggctgagaaccttgctggaagttatacatctggaaagtgatgtagcggtgatttaggtttgtcacactccagagaaagattatatactcttaagatctgtataataatatacaaaagtggtccccaaaggtgttacatattcttagtttgttgttctctttatgttggatgtggaagtgggatagagataacattgtggcttttggaaagttcaaactctatttctgttggcttaatttcattatcatttctttcatgtatagaatattgtttgtggggaatcaggcaggagagacacaagattagataaattgtcttgagaaggcctctttgaagaggtgacattgaaactgagatggattgacaaaagtgaggcaggcatgtgaagatcagggacagggtgttccagggagagggaagaacaaatgcaaaagcactgatttgggaattaacccaatgggattagaagaacagaaagtagatacatatggtgggagaggagtgaacaagggagtgagtggtaggagatgatggagggaaaggctatgtctgtatcactagaatcttataggacatagtacagaatatggagtttttatcagcacattagcaaattcaaggaggaagaataatatgatttagtttatatgatgactttatttagttataggatgaatttctgcttctggtaatgatagggtagctaataatccaccaagagaataactagaaaagccagccaaaataaagagaagatatttgtttgaaggtattgaagggctaccaaggcatccaggacttgaggggtcagaaccctggagggaggaggtgcattgaagtgacttcaacattctcattctttttctttttgaagcatttgttgatttgtaaatgacaaagacctgaaaagcttaaaagtccaatagaaagcagcagctaaagagatggggaagagattttggaggtctcaagaatgcaaaaatcctaaacaaagcaatagcagactgaacaatatagaaaaacaatatatgtcatgacaaagttgtatttattatagatatgagtggtaaggtaatgttcaaaaatcaaatgatgtaataacagaaaaggagaaaagccatatgataaaattcaacatctaatcctgataagaacttttaacaaactaggactataagtaaacatccttaataaagactctctatatattttttaaaaactacagcaaatatcatacttaagtgaaacattgagagccttgccctaagattaggtctgagaaaagggtgactgttctcaccactgctgttcagcattgtactggaagtcctggtgaatgtagagagacagaaaaaaaagatatgagcatttgaaaggaaacaataaaattcttttatttgcagaacatataattatgtaaatttaacaaatgaatttagcaaggatgctagatacaaagtcagtataaaacatcaattgtatttctacgtaccagaacaaagaattacaaaatgaaattttaaaaagataccatttaaaatgaatccagcaacatataaaaagggttataaactatgaacaaattgtttttccaaagaaggtgaggtggaacaattgcatgtctttatccaaaaattagcctgtactgtatacaaagttaacttggaatggattacagaccaaaatataagctttaaaactataaaacttctagatgaaaacatacaggaaaggttttatgactttatattagtcaaatatttcttagatataacaccaaaatcaagatttcctaaaagaaaaaaacactgataaattgaacttcataacattttaaaacgtgagttatttaaggacactattaagaaaataaaaagacaaaccacagaatgggatgagatatttgcaaatcatatctgataaagcatttaatatcaagaatatataaagaattcttatgtcggtaataagaaaacaaaccaaagcatatacattaatggcaaataatcacatgaaaaatgcttatcatcaccaggaaaatgcaaatttaaaggagaggaatagtatgaaatattattatataccacattgaaataccaatttatacccactaggatggctaaagtaaaaaaggcaataagaagtgctggtgaagatatggagaaactgtaacctttaaataaagctattaggaatgtgaatggtacagctactttggaaaacaatttggcactttttgaaaaggttaaacatgtacttaccataagacttagcaattccacttcaaggtcttgaaatgaaaacttgtggagaaatgaaatgtatgtctacatttatagcaatgttgtttgtaatggtcccaagctattatagaagcaatctaggtatctatcaattggtaaatgggtaagcaataattagtatatttatacaagggaatactactcaacattgtaaaggaatgaacagcccatacctgaaataacctggatatgcttcaaaagtattatgtgaagtgaaagaatccagacacaaaagaatctatagtgtatgattcaatttttagaaagggcaaaactacagagatggaaagcaaatcagttgctgcctggtgtggggagtggggattaactgcaaagggcatgaggtaacagtttggattgatagaagtgttctaaaactatgtagaggtgatggttgtataactatataaatgtattcaaaactcatcaaactgtacatctaaatagatgaatttcatgctatgtaaattttacctcaataaatgtatttaaaaagttaccacttaaaatagcttgaaatattaaaaacataggaatatatctaacaaaagatgtattagacctctacagagaaaggtacagaatattactgaaagaaattaaagatgacctaatatatgaaaggacacaatatatccatgaattggtgactcaatagggtcaagaggtctattctctccaaattgatctctaaatttcatgcaattctaatcaaaacaccattatgcaaaaggcaaagaataggcaagataattctgaaggggaatcagaacaaagttggaggacatatactatctatcagctcttcataaattcattataaatctacaataattactataatgtggtattgcacaaggataagcaaatagcaatagattaatggaacagaatggagtgtacagaaatagagccactcatgtagggacacttgaattttgagaaagatgacactgtggagcaatgaagaaagggcgatcttttcattaaatagtgctgaatcatttgggtatcagggcagggaaaaatgaacctcacatcataaacagaaataaattccagttggattgctgatctgagtgtgagagctaaatcaataaagcatctagaatataacatcatagaatgtcttcatgattttgggatagccaaatatttcttaaacaggacatgaaaaaacactatccaagcatcatttcatctaatagccccaaagtggaaacaacccaaatgaccatcaactgatgaatggataaataaatgtggtatatccgtacaatggaatattattagacaaacaagtagagaagtactcatatatgctgcaacatggatgaaccttgaaaacatcatgcaaagtgaaagaagccagtcacaaaaacaaaataaaaaaaacacatatcatataattccattgataagaaatacccagaaaaggcaaatcaataaagacagagagtggatgagtggttggttagagtttagtgagggtgaaggtgttgggaggaatagggagtggcagctagtaggtataaggtttctttttctttttgtttttgagacggagtctcgctgtcgcccaggctggagtgcagtggcgcgatctcggctcactgcaagctcctcctcccaggttcacgccattctcctgcctcagcctcccgagtagctgggactacaggcgcccgccacttcgcccggctaattttttgtatttttagtagagacggggtttcaccgtggtagccaggatggtctcgatctcctgacctcgtgatccgcccgcctcggcctcccaaagtgctgggattataggcgtgagccaacgcgccgggccaacgtttctttctggggtgattagaatgttctaaaattggattgtagtgattgttacacaactctgtggatatactaaaaaactttgagtcacatacacttgattggtgaattggatggtatgtgagttatatctcaataaaactatttttaaaacaatagcaaaaaatgaaaagataaatatattagagtacatcaaaatggaaagtttatgaactaaagacatcactagctgagagaaaaggcaagccacagaatgggagatgataattacaatatctctggcaaaggactagtattcagatcatataaatatcatctacacatcagtaagaaaaagaggtagtctacggccataccaccctgaatgcatccaatcttgtctgatcttgggagctaagtagggatgggcctgattagtacttggatgggagaaaaatagcccattggaaaaaagggcaatgaatttgaacaagccctttacaaaagaggatagtcacatggctacacagcatattacaaagctcttatcataattagttattagagacaatgagctaccattggacactcatctgaatgactaaaatgaaagaagattgataatactaagtgttggcaagggtatgaagcaactggaactatcatacagtggtgtgggattgaaaattaatataattactttagaaaactggcaatatttagtgaaaaacaattgtaggccctgtgacctttcacttctactagatatacgctaaaaatgtgagaatgttcgtagctccattatttttaatagcttttccaaatggaactcaatctgaatggtcatcaacattagaatgaataagtaaaagggtatattcacataatgaaatatttataaagtaaagaaaatgaatcaattacttctagttgcaacagcaaggatcattctaacagcagaagacagatacaaaagcatgtgctgaatgttaccattcatataaaatcccaaaccatgtaaaactaatcaatgttgttagaggtcaggataatggtttcctttgggctggagcaggaggaaattaattgggaagggatatgaaatgtgcttctaggatgatgataatattatatttcttgatttgggtagtgtttaagtgggtatgtgtgccctgtaaaaattcattctgatttatgcacttttctctatatcagttacatttcaataagcactttttttttttggagaatctattggagcaatgcaaaaatgaggggagcttcctaaaggaagctgttacaattacccaggtgagacaattgtatgggattcagggtagtggtgggtatagaaagaagttgacagatttgagaggtattaggtgtctgctcacgacttggtgattgatttaatatgggagtgttagtaggtcgaattgtgtgccctgcacagaataggtttacttgtgtgcccccaaaaagatatttgaagtttgaactctcattgcctcagaatgtgaccttatttggaaatactgtcattacagatgtaattagttaagatgaggtcatactggagttaagatggaaccttaatgcaatgtgaatggtgtcctcatagaagaggagaaaagacacagtgatacagacagatgaggggagaacgtcacatgatgacagaggcagagactggaaattaggaagaggcaaggaaggattctaccagaagtctcagagggaggaatatctgggtggatggtgccctgaattgaccaaattgagtttaacatggaccatcaaaccagaatttgaaaatttaattaaaaggctacgatgatggttttagcagacagtagaacataatgcatcaaagattgggcactttgagggaacagttttttcctcattctgctttcagccaggaattcacctaaatctccttgaccagttaggaatatagcttctttttaaagcatttcagagagggctgacaacctcccttagaatgaattgaaagaatggcagcaggaggggcagcaggagaggcaggttggtgtgagtaggtaacatgtcccttcttgttttttccaagttgtggggcacagctggaagtggaaccctggagacacagcctctctattttattatgcttcgggaaatctgaacaaggaagcagggctactgcaaattagctacatttccctttctatttctcaattccaagtactaggagatttgctagggcccatattcttttaatcttttctgggcagtgggagatagatctttgtcagatgcttctctccaggccgccttgaaatgaagaagcaggcttgtgagctgggaggccacaaagtcctactaagtttgggtatctgcctcttccgctttttgccgtgatcctttgacaagctgaccttctctgagttctctgcagatttcattcagtggcatgcatgtgaattggcatgaactttctcattgtttttttttttcctgctgtgggagccaggaatgtttccccattggtgggaaatgccccactaatccatctctttcaaagctgtcagggctcttttttggcaccgaaagaaaaataattgagtctaatcaagcaccttaaatattcaatatgattagaggaaaaatgaatgggttttgtaaactcctattgatactaaattctatttgcagttagtcttggacataaatttcagaaaattacatgtaaatgtactcattagtgcactataatatcgaacatctattttgtctctgggcaatttttcttttcttagcacaaaagctatttctacttattaaaaatagtaattgattttccatttttaaaaaactttttttttcagttccgtttcatctctgcattttggctcatgcattccaatagtgttttcctaaggctggtaaaagaattacattatgctctaataattctgagggcaaaggggaggaagggcagatttgatgttactgaggaaactattttaaaactggagtaggctcagaaaacagatctctaaatgacaacttgaatggcttcatgctaaggatttgattatattgtgcatagttttacctgaacatcttagatcttattttgtaattaagtattttgataaagctctaactaaatagtacttgagtaaaaatatggttttattaaaaggctctaaaacttaccaaatcagccatttagattagttgtaatatgaatgctttctgtgtgcttttaaatgtttgtttgacttctattccagtgtaaatttatttttaaaaaatgaaatactttaagagtttgatgataattttaatttaaaaatttatttattttaaatgacatttattgatatataggacatgttccattttcacaaataattttggggaaagaaataaaaatacttagcaaaaaatactttaaatcacatatttaagtgtgattttgtagggagaatatataagtttgttcatatgagtatggtatgtacctgaagggcaagtgaatgaacttctttttgtcactttatgaatccatttttttggttctattttgttttcagtgcttaactgaagataaattgagcacagagtaattctggtatacataggttgcatgtgtatgtgtgtgtgtgcacacgcatgtgtgcctgtgcatgtacatgtgaaatacatctttcataccatcaaataaattacatagacactagagatttagaaagtatatacttgtaataaatagggaggagaagattttgcatattttttggtattatcctatttttactatttatttattatgaacagaaaaatgacattttttttgattcgtgaagtccatcaaacaaagttctttgctgaatgtgtttctcctcctagtttatattccatattatggcaggtaaacagactggtatccaaattttttaaatctgcttgcaaaaagccagaaacactatagtgtcctcaaagtgaagatgattgtgtagtttggctttatgggtttggcaaacacaactggctacttatactattagttatttagtaattaaatctccaggcagtatattaagaccaaggtggtaaagcctcagccatcagcctcaattgaaatctcagttgtacaacttgctagcttttgtgactgcaaacaactttttaaacatgtcacaaggataaattatgatacctgatagagttttgaggaggatttaatgcatttaacattttgagaacaatctctagcacatagtgagaactaaatattaaaaaacttaaaaagttgaatgtgaccatctttttttttctaacctggtctgtggtacccatattgactttcatgttttggaaaaaggacatagaagaaaatgttctttaaattgtattcatatatgaaaattatatttaaaaaacacagattcatagaatgctcattaaagaaatcagtggattacaaaacttttcctgggtacagctgtatcacttttcattgttaataaagtatctgaatgtgagtgaattattaatattgttcagattatataaaaagcggtaggtggtacttttagcctttatgatcactattattggtttaaagtcaggtcattgtggcacttgcaattcagcttcaagaactatttgctgataatattattggagaaagcaagatgtatagtaatacataagcaatgatcagtctttaaactgactagaccatgatgtcattccaatttctgcatgggtagatgaaagcagggaatggggaggtggaagtgatggatgaagcattggttgcttaatagaaataatgactatcgggtgcctgtgtaatgttttccactcgttcttcctagaagccacagagagaatgggtaaggccccccttttttggtagcaaagaaaaagaaaactccagagactcagtggaaaatgtgccacagagtaggaacgactaataccctgtctattgtttatccccctgagacttcctgcctctcttgttagagcgatgggtgaataaaaattaattagaagctggaatctgattttaagacgggatgtcagacacatatatcaagttgttaggttagctggaaagcataacctgggatttatatatttagaagtcataataaatctgtctgtcatgaaaatcagattacccagtgttgcatgctaatggctatagtcccatggaattgtggtctccccagcaactgcccgctggccctgcctttttctgctttgctgtctgctttaactaaccaccgctctccccagttagcaaagtgcctacttaaagaaatacatctggacctttataaagaggtgttttccgtgggctattgtggcagcctcctatggctctccttgactctatttcttcaacagtcagtcagtgcatcaatcattcaattcactaatgtaataattatttccaggatatttattgagtagttgctatgtgccgggctgtttgcaacatgctaggaatcaacaaagatagtgcctgctcacatggaagccagtgatggtggagagagataagaaaaacacactatgagatgggtgaagtgtgggatgtaaggaactcagacttagggactttgaaaaaggctttccagatgccagtatcttttgagctgagagttcttagctgagtggtgggaattagaccactggagagtttcttgggatcttacaaactaggtgtaaacacttaggattcttctaagatcagtggggaggaagtaggggtgatacattcccactttgctaaaagctgtcagattactgcattctactggcatggctgtttttttttgtttgtttgtttgtttgttttttttaataattgacttgaaggctttgtgcaaagtggtgccaaattacctttttgactttagttctcactctaatttctcgcctttcctgtgctctaagtatgcttgaactctattacccaaatattttgtgggcttctatgcttccattcctgtgtttaccctgagccatagctcctgtcacttcatttctcactagtatatacttcatacattcttccaagtccaattcaatgacactgcacttgggggctttcgttgatttatcttaggcagaattaattctaccttaagtttgtacttccttaagtgggattttcttcatttatccttccatcaaacaaatgtttgttggttcaagattgtgtttcaggtatgtggcaatgatcaacaaactgaagtatctgacttcatggagtttatttaaataataaacacatttagcctcattcatcctgcctgtaagtttggttaggtatttacacacctgtctccttgacttacttgtcagatgcacaaggatgaatactatgttccttgtatgtgcataataaacttgtttttaattaaatgaatgaagaaccaaaagaaacaggatgaatatttgcagagagatttggcctgatactttgtatttcagtgtaaggaaaatgtattgattttggagtcacattgttgcaagttcaaaccattcctctacctcttaacacctgtgtggtcttggataaatcacttaacctctctgatcccactgttcttctattctgtatatttctagctcatggtattgtggaaattagaaacaatatacacaagatgtttatttctgtgctagagacatattaaagactcaataagtaattcatcttttatgtattgtattcttttcaacagacttcccatataaaaatagggtgaaagttttgtagcctatttgtccttagaaacatacaatttgacagactgaggcatgcatggtccgttcagcattcaccatcttggtcctaaaagagtcctcaagagacatgtcatggatggatctcacttttccttttgtctctggattggaaagctttcgttcttttaccagcccttatagctctgtctttcacaccctgacctaagctattatgaaagactattatattttctaccagtaccacctcttggggctgatgaattctggaggcttattttctctatggggaagtgctttgcaaattcaaaagggtttaagggtctcccctctgcatcgcttgtttttggcatgcctccatcgtagctggtaggggttgatatcgcagattatctgttggcctggtgtgcagagaacaggtagtgtttaaatctcagatctttcatctgctacctttataaccttaggtaatcatttagtctatagcttacttcccttctctgtaaaatgaagatattagtaacttggtcatagggcacttatgagggattaaacgaataataatgtaaagtgctcaacacaattcttaccacattggaagcactcagtaaaggacagctgttattaagctattgtattattgctgtttgtatttataatcattattattttcattagagtgtttgtctagttccttgttagactcaaaacttggtaataggaaaaccatgtctttaaatgtttatatccctagagatgtctgacacatagaaggcagtgaacgaatacttatttaatggataaatgaacaaaaatataaagtattatttattatttattatcaaaatgtattaaaatgtatatggagtgctttctacacagtgggaaattaatacacacttattcctttcctgactctacttaactttccctagttatatcaaaaggtttttctgggttctcaatctcagtgaaaaggattgtttgtgttctcctcaccttttctggttctataaagggttttatctttttttaattttgtttctatgcaatggtcttcctaatcttccatcatttctgacttgttgggtgctaatgattttaattctttgtgttactaaaaagctgtttctgagtgaattccctataagtgtagatgccatgaaatagtattttctgggtaggtgtgtatgtgcatgtatgtttattctttttaataaaacaaacatcccttatagtactcccccctgccaccaccctcttcttgcaggaggagagagattgttaaaccaatgggcagtgagggtctgcagctccagatgcgacacaaggttgatgcagaagctcccactgagaatgtctggatgactttgggaagtgaaggcatcttcctgttgtgcctatttttcccaaaaggagtttagccaggggctaagacattttttggtagaacattgaaacctgctttgttctttctagccgtcaattccgtgcttgccatttgttgtttttcttacaagtgcagtgctttcttttccctttctcagcttgacagcttttgtctgagactgaacctagcttggcttttccatgtgtctggtatcctttacacagaacgtttaacttgatgcttttcacaaaggttcacacactcaatgctcttggatgccagctgggaggattctgttatggggtaaagggggttaagtaagaaattatttacttctataaggaattacagccttttcattttctaaaacactcagtcctcttaacccatctttattttccccatttatgatcaaggctcaccaaaatgaatatttgtctttgatcattacttaggaaaaataacaatactattaagaagaagagaggtaattgacattaggcctcagagacaaggagactgtaggagtgatacaattgaggcaaaggataagagcagcctcaactcagccccagccatttgttatcttgtaggagtgtggtgccggtagggtcagagcttccagcattttctgtgaaatctctcgatttacaaatgttgaaaataattttaaaatgttaaaacacaaagtcaaccattactgtatggtccaaatgaaacagagcaatgggtcagatttggctcatgggtcaccagtgttcaacctctgccgtaatgcagtaggtgcacaatttgtatttttagatattcttgcatactcttttagttctgaacaaaaaacaagattacagttagagatgtctcatttctaaaaatcactcgaataccctctcaaaaagagaagactgtgatattctcttccgagtgagtttatagcaaaactctgaaggattctataagataaatgggttagttgtttttcacttagtactgaaggcttaaggggttttttgtgttcttcctcttgttttccatttggcatgtgctgcttatgctttaaaaaaaattaaactgacatgcagtggaaaaagttactggagcctgaaagttggttaatatcaattacattctcgtgtctaataacccatgcctgggaaatgcaacttgtttgttataaatacccaatgccaaatcaagaataaaccgctgctttgttttagtctgtatttacagcatcattttaactactttgaccctattcaaggaggtaatgaagagctgggtgccagtgatgttgataaactgtggcaatttctgcattgtgtccttatagctgcctctgcttcagcctctattatttaaattgctagtcattacagtcatgccattaactggaaatgccgcaagatgacacataggaatagggccagcaggacactgttagcccttcttactgagtgcaacattctgggatggctagcaatagttataaaaggaaaatgcacaaacccaactcctaaagcttgaatactcacgaattctttgcagtgctggtagggtgatttttgaattcccacttgtccatattttttagaccttagacccaaatcacaaataatattccaggctttaaaacatatattttatttttcactaaaatttaaaatatctaagcatagctcaggctggcttattcttctccatcaggatcagacgcagaagaatatgggaagaggaggttgttcagcctgggatgtggaatcaaacaaagtaattgtccagtcacttgactcttatgaataccatttttagaaaagtgcacactttattactatagggcccctataggccaagaagcctgtcagtctccattacttgattaagactcacagttaaggtagtccatgcatacaagtagcaaatgatttcttttgatctaacagcatacactccatccatcctgatctatctagggaacctcttacaaaagcagggcctctggctagttgttcaagacctacagggaggagggattggaagaggtctttgttgttcaagattttgttttttttagaaggcctcgaatttttagcaagatataatccattacagcacatgtctttccttggaaaactttgtctttgtccatagtttttgggggcctttataaaaaaattagagaaattgggtcctgttgtgcatgttttaagaggaggaaaaggtgcatttacccctttctttcttgttactttctctattaactacatttacaagccataaacaagtatatactgtgtatactaaatatgtatttggaaggtgagagaaagaaaagacttttttttattttttatttgttgaactctgctctctgtcatgagcttggcacttttgctttttgtatcacttacgatcctttcagataaaagtaatagaaatcctagttcaactgatttaaacaaaaattttaaatataaataaaaaaaatagggccatgccagaattcagcaacaacattatcaagtatcaaggtttttttctgtcttttatttctcccctctttcaggtgttacttttctttgcaggcttgtcctctaatggtccaagtttggctatagtgcatccagaaatcctcagtgtctgaaggccagaaacggcaatgaatactcatccttctgggtgtcctttgttttcttaaatgtgaagaaaactttttcagaacgaccctggcctccaacaattgtcccacttggtgattggccagaatttcaaaccataccctgaagtgatcccttgcaaggggaatgaagttaccatgcttgtcctagtctagttaagcttcaagccttaggtctgagtaggccccagcctcttgtccctgggtataggttgtgggcagtcaatacctgaataaaatcacaaagtcagatcctattagaaaggaaggggagggagaaataactatcggataggaatgcaacactcctcatttaactctcccaacaactctatcccaaaggtccagaacacccagagagaatgaccttacccatggtcatagagctagaaagtaaagagctgggatttgaatccaaatgtttctggctctaaagtcctggatcttggaagagaccaaatgagggggcatgaggggtgggactatctaacaggagagtgattgtgtcactagaatattccagggaaaatgtcaatgggtctgtttagctcacaaatcagtaataagttataaaaacaacatttgcattgagactatttagaaaatgtaggataacataaggcaaagaataaatatcccccataacttcactatctagccataaccactattaatattttggggtatttcatctttgtctttgtaaacacacacaccctgcttatacactcaaaaatatgtactgatcattttctgtgtagaataatatgccaacgtagaaatatatatggaaatacttattataaatatattggaaataggctgcatagactgttttatatcttgctgttccacttaactttatgtcatgtacatttttatacattttcctataaactaatttttaggaacattatttttaatgactgcatagcaatccattttatagataacaaaatatattagaaaggtttcttatttgtttctccctatttctctttatgggaagtaacactgtaaatgagcatccacacatgatatatctttaggcacatcttttattatttcatcaggatcaggatacagtctttgaaataatgggtcaggaaatatatgttttaaaattgtgaacattcaaagcatattgccagattgcaatccaagtatgttgtatagtctacctttccaacaacaatgtgtgagagtgtttggactctttcttcatggctcttagctaggaattttttttcttttctttttcttttggagtagatatggaagttatgtatcaaggccctgcattccacagataaattattgcttatacctatttgttatttctcaaggggattgctgagttcattatgcttcttgtattaattgtacaaggcaaaaatggaaccccatataagatattgagaaaaaccatcacaacttgtactgaaatcatatttgactttgtatctctacccaaattgaaataaaaacctccataagtgctcgtgcattgttaaaatattcagacaagttatttggttcataaataaataattttaacttttatgataatggagaggacgagaggtggtatgagactgtctgaatatgccaataattcactctcttgcagccaagataaacagcatcatgaattaaatgatagaacactggatgaggggctgcaccatcgtaagactgggcacttgttagggatgcatggatcctcaaaatatatagcatgtcaaagaaaattagtattatgtatttcagggggtacaaagagagatgctctcaaaaggtgtcctgggaaggggcaattagaaattgttgtttagcaacatattggttatgaagagaaggagcagaaggcaggaagcttatgtgtacaattcagttttgcattatcctgggtagagccaaagagactgaattggattctaataggttagaaagacaaatgaattagaagcagccaagatctgcaaatttccacacaagtctgtccatttccacgggggtcttttgagtgattttcactgccatgccaagtgttttcagtgacctactcaaaactggaggaggagacacagtacgttgaacatctacctcttctctgagcttcatttcctgctctgggctccatcctctggtcctcatccaattacctcttgctctgacataccgaagcctgccttttaatgccaaaatttattcattctttcacacatcaaatagtttattggctaaattctgtgtacctggtaccatgccaatcaaaatggtggttcctggtcaggaacgacggctcatgcctgtaatctcagcactttgggaagccgagttgagtggatcatttgaggtcaggagtttgagaccagcctggccaacatggtgaaaccccgtctctactaaaaatatacacaaattagccagccaggcgtgctactcagaaggctgaagcaggagaatcagctgaacctgcaggcggagattgcagtgagccgagatcgcaccactgcactccagcctaggtgagactctgtctcaaaaacaacaatgacaacaacaacaaaaccaaaatggtggttccccatcctgcttatctgattggcttatctcactagagtagtgtgcacttagatctgactgaagcttgattctcctgcaatcttcattttgaagaggactttgttcataattctttatcatttaccacagttcttcctgaacatatactatgtgtggggcactgtgctaaattctggggatacgaagagtttaaaatcacgcaatgctggttaagaaaggatgctattcttgaatgtggagttggttagtactgcctgccactctagattatctcttctcttttaatttttgaaattacttccttaatttggttgggcaggaattaaaatacagagaacaatacctagtttactgactctggttagtaactacatatgctaatagactcaggaaaacagggttatcacctaccataacagtccttaatcatggctacacgttagaatcatctgcgagatgttgggggaaaagcacaatgcccaagacatgccccagagcaattgcttcagaatcactggggtgtgtgacctagacatcagcgctttttaaagctcctaagatgatttcaatatgcagccaaattgagaagcaccaacctagaaagtgaaggtgcattgagttaccacctttccccttgtggagcaacctttactcaagcatttttccaggcagcccaattccattatatgtgccacgaaaaaaaccatggctatcattttcaagaactctgccctccttcttggagatttaaagcagacattcgtattttaaaggccttcagggatcttgccattaaaaaataaaaaagaaaaacctgttgaattctagtagaattctctattaattttgattcaggattggcttgtgttttctccctctttctctcaaccaagaatttcactgaatatatctgataaatggccagagtatgcaagagctgattaatctagtcagggagtgatttcagtttttgtttctctattctctggtcccccttgctgcctttttctcattactttttgagtaggaaaggggcccactgaagaggtaaagctgcagtcaaccagtttgttaaaagctttcattgactttccaacaatgtaaaataaggctacattgtggaagagtcttctggttctcttattttctatattggtggttctcaaagtgtgttccctaaccacagaatcagagtgaactgactggtgtggtaggtagaatcatgcgccctccccccaaagatatctacaccctaatctccagaacctgtgaatatactatcttacctggcaaaacagactttgcatatgtgactaagattacagaccatgagatggggggattctcctgaatacctgggtgggcccagtctagtcaaatgagctctaaaaatcagagaaccttttcaggctgcaatcagaaagatatggcgatagaggaggcaggtgagattcaaagcatgaaaagaacccaacccctcattgctgacttgatgatggaaggaggggtcaacctcctaacaaatgtggaaggcctttagaaattcagaatgaccttcagctgacaggcaataaggaaacaggacttcagaactgcattctgccaacaaccggaatgagcaaggaaacattcttccttagagactgcagaaaggagtctgcttacaccttgatttgagcttggtgcgagttgtgtcagacttctgacccacagaatagtaagataatgaatttgtgttgttttaagcccaaagtttgtgtaaatttgttctggctttattcggatagtaatacacctggtaaattactgaaatgcaaattctcaggcctcaccctacacttacttaatcagaaactctgaggagggggttgtgcagtctattttaatgaattctccaggtgattctgatgtgctgaagtttgagaaccaccattatacaataatagaattcccaaatattgagtaggaatatagcttcccagaacaaagactgcatttcttacttttgttgcaggtggttatggccatttgactaagttctgaccaaacaggttgttcagtaaagggttaactcaaggcttggggtgttcaaattctgcagataccaaataaaagactggcccttgaccatctccaaagagataaccttggagcttttgaagcaccctaactgagaaaagtgcctttgaatacctgaaactgtgggtcttgccagatagtttatactgacaatgtgattgttggtgaatgctgtttctgttcacctgaagccctgggctatgttgtatcaatttgacctctggggggactggagactgggtaattaaggtcattcgtgtgggaagtccatgtctatgtggctgacccccaataaaaatcatggacaccaaggctcaggtgagcttcttgggttggcaatactttatacatgttgtcatacatagttgctgggacaattaagaaccagctgtgtgattttactggtagaggacactgtaaacttgtgcctgttttctcctggattctttcctatatacctttttactttgctgattttaatctgtgtcctttctctgtaacaaaccatcaccatgagtacatagtttttctgggttctgggagtcttttagtgaatcattgagtctaaggattgtcttggggactcctgatgcatagagataataagaaactttatgagcaactttctggacattttcttgtagcaggtgcacagtgccacattccctatccccacctaatttcattgcagctgtggcagatgctgtcatgtgctgccagggtcctcaagttctgctgtgctgtacatctactattctggtttaggccttactcaaaaccaaaagaaggcttcccagcccacgcacaagcatagccggggaagtaacagcactacaggcaatgcttaaccaattggtgggttgccacagccttctatcagatggacagttgtgggtacattccacacagctcctcacatagcaccccaggtgttgataacacatgctgtttcctttttccttccagtgtttactgtctcatctctttctttcaaattttctgagatcaccatccaaataatctacccaaacctatgcccttggtccttgtcttaggctttgctttcaggggtacactaactaggagaattcttaaagagaagatgcattacagcttcctccttgctgccaactggggtgcagacataacggctcattaatactttttgctgttttcttgtttgtttgtttttgtttttttgagacagagctttgctcttcttgcccaggctggagtcaaatggcacaatctctgctcactgcaacctttgcctcctaggttcaagcaattctcctgcctcagcttcctgagtagctgggactacaggtgtatgtcactacgcaaggctaattttttgtatttttagtagagatggggtttcactatgttggtcagactggtttcaaactcctgacctcagatgatccacccaccttggcctcccaaagtgctgaggttataggtgtgagccaccatgcccggcctttttggctatgttaagaagatgaatgctgtgttttgaatgtgtcccccagagtttatgttttggaaacttaattcctcaatgcaacagtgttgagaagtgggttgtttaagaggtgattagggcatgggggatctacccccgtgaataaattaatgtcattattatgttaatgggttcactattgcaagagtgggtttgttatccaagtgagtttagtcacttcttgctcctttgcgtgctgtttctcatcatgtggtgccttattacatgtgtaacacagcaagaagtctttcacaagatgtgggcccttgatcttgggcttcccagactccagaattgtaagctaataaatctctgttgtttataaattacctagtctcaggtcctgttatagcggcacaaagcagactaagacagtcaccctctaggaatggagatacagtaagttgaaggcatctaggtctgtaatgggtctgtagaactgccatgtcagcactagactactgatctccaaacttgttaaatgagagaataaaagcttgtatattcaagcttccgttcatttttttttttttttgaggtgggaggtagtgaaagagtggttcacattcaacttaacctttttctgactagtacagcaactaatggctacatggagagtttgatttattgtcaagttgaaattaagttgtccctgatgtttatcatcacaatgattaagggttgactgcctgagggacaagcatgttagttttggggaagcgcagtagactgagagtccagcaacttggattcagtgttcacccctaagcagctgtgccatttaatttctcttggattggaccttcttgatctcagggtcacttttgatttttatattccatgattctatgatttaaagtattatgaaattcacatgcaaaaacaaaacacttagatcattatgaaatgtaaatgtgaacacaccatctatatttgcattttgagatttcctttctaatagaatgatgagcacatcttagcctgtgtgtgtatgtgtgtgtgtgtgtgtgtgtgtgtgttgaaaatgactcgtgagatagaagccccttgagacattattaaagttgatcacattactcactgtgaaaactcaaactttccttgaatattggaagctgtttacaaaactctgtttacctgacagtgattcttcaggctaataggaatcttcatgtgtcttttttttgtttgcctggatggtacccaatcagtctatataataagacaggccaaaggacagggaattatgccccaggacactctctgctctgtcatttggatttgcatgcagaaatcataatttatggtgtgatcaagaatgatataagttggcagtataatgagcttgggatgttggatagcccagatgtacaccatgacctttgctggatggaagtgttagacttgggcacatgcatatcagttgtgggtaaagactctcctttggggagtcaagggtcatgaatttttgtctctaggcagcatatacacagttgcctggcaactgtgagagcaatttagtccttgctatatgatcctatgaaggatttcatccatcttgaaaagctaacagcataatttaaatttttgaagcagcgtgtgggcgttctcaagtggcagagccttatctcacatctagttgcacactctgtgtaaacttgaagttttcctgcatgaaggatgctgtaaacaaaaagctagaactctgaagtaaggttgaaagtgagatccttcattagaatgtattcagtatgaagtaacagaacacccaactaatagtaccataaatcacaaggagatttactgtttcctatataagaaacctcaaattaagtagtctcagtgttgatttggctgctaaacaaggatccaagctcctttcatgctttcattccaccattggcggtgtattggccttaatccttagacttgttacctcatgccacaaaatggctgccagagctttcaacaccacagtgtcctggattagcattcaacacaggataggagggaagggagcaaaaagggccatctcgtggtgggcctctctctctctttccatttcaggaaagaaaatctttccttaaagtctcttagcagatatctttcgatttctctttggctagaactgagtcacacatgcatcccatcccagaccagtcaatgtcaatgaagtattcagttaccttcactggctgagaccagtacgtttcagcctcttatgctgagagtaaggcctatcttccctggacacactaccacctgcaggtacctgagaaagatcaaggtatgttagcaaggatgaaggactgatggctgctggaaaagcacctcacactgctgctatacttctgtccatgttaatgcttatgtgtggaggtcagagggaactaagtcatcgtcaaagtgtttttaaacatgacattgaaatcataatttggaaatagaaacattttgcattaaaattggattttttttcttctgttaaaaaaattcatagatttggcaacatttgaaccacatacacacatgagagtattgccttcttcccttgaggcatgtgtttcagtttaccacgttcttcaccactctttctgtcatgcacttggtcctctttactcatgtatgttaacgtcctggcccccatattcatttgtgtttgtgaaccttggtctagatcctttttagtgacatgcagacattatgaaacaggagtcttacagtcagactggcccattatgctccactgtgccaactgccacccttctctttcatccttcccatacttgggattgttttgctcttctggtatatatttttaaaattttatgcctgtagaagggagtatagtgcaatggttaagagcatggcttttgacataatacataagtggtttgagccccggcagtatcacttacgaacttgtggccttgtattcacatctgcagaattaaataataatggaacctacccgatgtggttgatttgagaactagtacatggttcacttaaaactaatcttttttttttttgagacagagtctcgctctgtcgctcaggctggagtgcagtggcgcggtctcagctcattgcaagctctgcctcccgggtttacaccattctcctgcctcagcctcccgagtagctgggactacaggcacccaccacacccggctaattttttgtatttttagtagagaccaggtttcaccatattagccaggatggtctcgatctcctgacctcgtgatccacccacctcggactcccaacacttaaaactaatcttgacgaagatgatgaagaagaaaatgatgacatctctacgagtctgtgttaatgatatcagttagtcctccaaggcgccatttggaatgcgtagcacagcatcttcagtgagcagagctgatgaatagcaactatgtatcccgtggagctagaagaaggtcctttgagtgaccacatgcttgaggagcagtaatcacctggaataattttttttctgttcctttaagagatagaatcagatccacttaattcatggctccaggtaaccaatacagctccaagaaattcagttctgcactcaagatttgctcatttctattcatctgggggcatattctgcatttatactgtccaaaagcagtggatattttagtttatgcctggggacatgggaaaccattctcaatgtctctactgacgttggagagtcacagtttccataccaaaaactctttttttattctattcttattttttggtctaggtttcaagagattcatccatttgtaactcaatctagagatataagatcgtataaatccaataaattatatggaggtcagcatataaatgattccagaagagtcatttgggaggggcaaaaggatattttgagattgggtagttgctttattttactctccagataaagtagatcctagtaaattaggttaagggactcttagggacctcattataacctcattttttaaataattaaactaaaaatatcaatcagttggttaggataataagcactatgggcaaaatcagggggataccctgttgtggatataaataaaaatattatacttggattgggaagtttggaactattaactatttgaaatattttgacatagaaattccttgaaatgtctagtaacgtattctgtagatatatttgaccaagtagctaaagaggttcaatatagtattatatatagtattatatgtctatacattgaaattactctgcagccattaacaagcatctctatgaattgacatgaaaagatgtcaaacatgtgacagaacagtatgtattatagaaacttagaaaaatatatgtctgtatgcaaaaatgtacatgccaaattattaatataggctccctcagggaatgaaattgtgtggatatgagggtagagggatgggaaaaagaagaggaggcaaaatgtaatctttgatttatatgcttttatacatgttttgcaataacgtgtaccttgtaattatcattttatatttgagagtttggaatggaaacgtagggagttacaatattcctcccgagggacaatgtcatgtggaagttaagaacacaagctctagagccatgatttgcctggacttgaatcctgcctgcatcattgctgagctgtgtgttcaagcaagtccatagacttaaaaatagaattaaataaataaataaaagtagaattagatatttaatttaaatttaattaaaacaaattttaatttaaatttaattaaaataaataaaatagaattaaaaatttaccctaggcatccagagtctagggttagcaatttatgaaaggtgaagatattcttttgatattaaataacatatatatatttaaaaagtgaaactttgagaggagacaagtgactggatagataaagatgagaaacacagaggcacttacctgtaaccaaggcacaaagtccacagccttgaactaaacatatatcacaacaggaacacaaaaccaaccgactgaaactagcagattgggagactcaaaggaggggggaaaatgtttcataaacttcaatcatctcacttcttcccagctagtcttctaattcttcaccttatctgttctctcctgacaacaagtcctgtatttaattcagattttatctctttgtgggacagctgattcgacaattatatatagttcatcaaagggctggaacattctgcagaatagtgaaacaagtcacttggaaatgggaagacatgctcaaggatgaatgcatcaaaagaagctactataaatgaatcagtaggagtgaggcaaaaacaatcatttggtagagaatgcttaggaaaccagggtaacttgacctccaatcctaagacttaattgagctaaggaactgagtgctgcaggatcatgctctgtggttgcttagatgaaaagccagccaggctgtaagaacagtgactgattgacattgacagccttccatctggagcttaatctgtccgcatacatctgtgacagtgttgtgtctttcagagcaggttcatgtaatactgaaggccaaacatcaagcaagaagccaaagtctcagtcattagtcacacatttgggccatagggcaattccaggacattgcctttacttgcagctggagaagatatgatggcccataatgtggtacttaatgaggagtacacacagatgacagggctaaactgcagcagcaagttactgctaggaaatagctccagcttaggggagtttccctctgtgctttttcccagaaagctgctggctttcttctctgaaacacagatatgtctcctgattgactgtcgtcatagtagctcattatggttttgggtggcagcctgttcagctatagtaaagtacagtaagtccttacttaatgtcattgataggttcctggaaactgggacataaagcaaagcaacatataaccaatttcaccatagactaattgatataaataagagttaagttcctatggcatatttctggtcacaactataccatcaaacttctaaatagaccaaaacactttgaatattttacattgaaatctatgcgaactatatacacatttaagaaagagtaataaaaacaggtaagataattatttatattccagttgagggtctcggatggctgcagcatgtcccagcagctcagggtgcaaggtgggaactcaccctggacaggacatcatcccattgcaggacccactcacctacacacctacacacacacactcatactcactaagatggggaccatgtagacatgccggttcacctaccatgctcatctttgggatgtgggagaaaacttgactgcccagagaaaactcatgcaagcatggggagaatgttcagaccctacatagacaggggccccactgggaatcaatttattttctgtcggtgttataaccagatggcattgaatgaactttatagcaatgcaagaatgggctaatgcaagaacgacgttgaggacctgtagtgcagagctgcaaagtgttcaggttgttccctgcccttgatggcctgatgactagtgtctccttgcctcaaagacaatcatcagttgttttctttgaaggaggtttgagggacctgaagtttccttgaaacacttaaggtctccatttcctcctactttaaagagaatatgtggccattatttacaaatgaaaatactgctcagatgaggtaatttaagaagagaataaactttggcagactctcttttaaaaaagcacaagaataggtgtaaccagacaccccaaattaacagattttcttcagtttatgggtattcaatttatctcactgctttctggcaaaaaaaaaaaaaaaaaaaaaaaggaaaaagcaaagaaaaaaagccacattgaattaaatggctttcattatctgtcaaaagcaaagcatacactttttttgagaataaaattcacatgtgaattactttagttagctgtggtcgatgggatactgtgtaaaatgttggacagtgttttcaaattgtttcatttaccatttacgaaagttactataactgttcaaatggacgattttaaaattgactttctatcttagctaacagcataacaaatagtagcttagggaaatgcttagttgggagtgaaacatcctcattttctagggccagacattggggaacctggaggaataaacaattatgtgaccagcagttcccagagttcctctttactggacacagaggaaggacacttgtttggaggagtagagtcttgtggtgattaagaaggtagattctagactgggactacttgacctcaaatcctggctgcatcatttatgagctgtatgaccttgagcaagtccatcctcttctctggacattgtttatttgtaaaatagggacaataatggtacctaccatgtaaggttgttgggttatgctctttctgtagacccatctgcattagtccgttcttgcattgctataaagaactacctgaaactgagaaatttataaagaaaagaggtttaattgactcacattccacaggctgtagaggaagcatggctggagaggcctcaggtagaaggtgaagaggaaggaggcacctcttacatggtgggagcaggagaaagagactaaagggggaagtgctgcacacttttaaacaaccagatctcactcattattgcgagaacagcaaggaggaagtctgcctccatgattcagtcacatcccaccaggcccctcctccaacactgaagattacaatttgacatgagatttaggcgtggacacaaatccaaaccatagcactattcatatctttcctccttaggaactatattggggaggggaatgaatgagaatgatgttatcttaccgaccatctcaaatatactttacatgtatataaattattggaaactatcatggaatatgtaaaatgtggagacatcatccagggctgtagagttgagtagagcagtttgttgtgccatatgtggagactcatgcttatataatcatagacctatagcatcataaaactcatggctcacgtttatggagaacttattacgtgccaggcagtgttctaagtggtctatgaggattatctcagtgaatcctttcaacaactttgtaatgtaggtgttgttttgtcttttttttttctgtgatattaaagaacttgctaggtctcagagctaatctctgttagaggtgattcttgaactctacccagtttgatttcagatgccagctctcagctgctacagtgagaagttttggagggttctgtgacccaaggagccttcctcaccaactgcctgagcttttcagatagtcgtcttagctcttgtttacatttgttggcatagaacagtgttgtgttgtgagaaaaacttttccttgcaggtgaaataatttagctggatttgttttgcatttttagtgacgcttgactcctcatctggctctgtgtttaatctgccacccgagtgcagtgaacctttcattatagcttcttcaccctctctcccccgccacatactttccacatttaatgttccaatggcctgggtgttctgaaggagaattaaccaacatgtaacataatttatggcctttacgttccttggtgttcagagaataataaaagttacagtcattaggtatatctgatttgtgattttttttttcctaccaaagatattcatctcccttctttcctgtacttactgtgtgtttcattggaaaccatccagagctatcacctggtcatggttctggaaaacaaaggccttttccaccaccagctttcactgtgaccaaccttgagtaacatatggatgccattccaagggaaaaaaaagtcttatgaacccccaatgttaacttaatgtttttgttattggattattgaaccacatgaaaatacaaaagtaggtatgaatttctttgtgtggttcttagacaaatatgaaaccataacacgtttacaaattacatgcaatcaaaatgacaaaactaaattcaaatgaggaatattgcattaacaagatgaatgatattatttgtttaaacagaatcatctctggaaacatcaatacgggatgtctgttatgtcaaaggttctacacagcttgtcatgtttgtgttagcctaggctgtgtgatgactcaatttccctaacacttccagctgctattactgggacaattcatatgtactccacccctactctgagatcatgaggcacaaacacattatttaagtagtaagtttgttttttttatcttttgcttgtgacagctaaaacagcaatacctgataccaccacaattataaatgcaaacataaaggagtcacaaaacttttgtgctggtacccgtattttaggtgctatgtagctgatgcagaatacacttgaactattttaagtgagtattatctaaataaaaccaaaaataaaaagtctcatcaagaacattcagatccctaagaacatgctcagagaccccagtttgaaaaaggtgtgggtcatctgtccttcctctgtggagaggattgctgttctctgttgggaatgcacttcccaaggcgtgttacatggctcactctttcgcttcattcaagtcattgttcagtgtcattgacatgggaaggcctcccctgaccaccttgtctggggtagcactctcatcagcttcgcttcttactctgccctgttttttcagagcactcattataacctggcattgttgtttgtttgctttcacctgtctccacaattagaatgtaagctgcattgagaatggacttaggtttatttatgcctcacacagtaggtgacaaagatctattgaaccaaggaataaacactcttgctcttcaacctcgcttccttttggctgggtccctaatcccaatcttcacctgggtaaagactcatttttttccctttttgtggagcatggtgtcttgctatattgcccaggcaggtctgaaactcctgggctcaagctatcctcccgcctctgcctccctgagagctgggattacaggcgtgagccatcccacccaacaggtaaagactcattttaaaaactgtccccactgaaagattaatggatacaaaaaatagtaagaaagaataaataagacttagtattttctaacacaacagggtgactagagtgaaaaacaatttatctgtgcattttaggataataactaaaagagtttaattatttgtaacacaaaggataaatgcttgagatgatggagaccgtaccctgatgtgattattacacattgcatgcctatatcaaaatatctcatgcaacccataaatatatacactatgtatccacaaaaattaaaaataaaacttaaaaaaaatacccccacttaagcctacattctctctgtccctcattagaacacctagaatctgtattgggactccttttatgtcactcatggattccacctcatgatattttttcttcacttttatctcttctcccagatcctgagctccttgaggacaccatctgtgtttgattaaccttgaattcccccagtatctggcatgaatgcagaaatgtggttatacatgggaatcacccagaaactgtagagtacttggttctaaatatcattcacttctcttccacagtatcttgcagaggggctagcacgtggttggagcttgatgagggtcagtggatagcatatggtgaaaaacactataagctttgggaactgaattctctatgactaacctgatgttaacactacagtaggagaaattaaatttatttcaactgagtttttctcatctctattatggacgagaccctaattaggcattattgtggctacaatgagcactgtattacctttgagttcaagtttagtggagaggacagatagaggtagggagagacagacagagatagtgtttgttcattcattcatccatgcattctttcttcagatatggagcatcatgtccttgctactagatttaggaaaactcaacacagaccttgtctaaagcctagccctagtggaaaagagacgcatcacagatgcctttttttcctgaaaaacaaacaaacaaacaaacaaaagatactaacaacaactgtggttagtgcaacaaaggaaaggaatgcagaggtatgcaaatgcacgtgtaatgtgccctgttccaaagcagggaaggttctccttgaggtataacgttgaactgaaaccccaaggatgagtgggccctaaccagggagagcagcagaggaatagcatgtacaagggggtctgaaaagtaagaatgtaatagagggaccccaaagtgtcccaggggtatagggtgtgaaagagtaatcctggctataggtctggaaagcttcatagaaggagggttttgactgggccaacaggtcattcttaggtacatggaagaggaggagacagctgtccatccagaccaggagaccagtgttctcttaggcacagaggtagaaatgtctagatctggcttgggaactgtgcagggaagggaatggctaaattgcagggtttatacagaacctctctagtagaataattatattgatgaaatacagaaatatctgaaaaccatgagtcacaaatcaaaaacattggttggtcaaaaacgaaagcttgttatgtttaaaatgttactgtgtataaacaatcagcaaagataattcttagctgatgctactattaacatttctatcaattaaagatctttatcattagcactgtatgtcacccttttaaagtaatttatcatatggaatcacagatgcctttttttctggaaaaaaaaaagagataatttgttacaaaaacattacaaattatattgagttgacatcactcaattatagctacattactgaattacacctgttcagcccagagctggggaatttattagcacaacctccattagagctaatgggaaatacagttccagtgctctttgaatccactgcataatctgtaagaagtgtttttcctgttgggattgttctctggccttgacaaggtgagccatgaagacttcatttcttatgaagtctggggataccacaccagtgctgtttattcacacaggctgtgacatcagggactagctgggctgtgagagcctgttcagacaggtctcttcaagcctctggacagatgaccctgtcatcagctgctcctttcccagcgcttgcttacctgcattttagttttcattacccagccattatgctcactgcccacagtcacctctgcttattgatttgggacctgtgccagtttctaattgtttcctttagattgggttcgctccagattgctgattcttgtctagtaatttctctcttctatattgtgcctttccttgccctcctttactaatttcctgagtagccagagaagctatgggtttgacccatcaactcataccaaggccatatgagctatggtgacttaaaaaaaattaacttgaaactttaaacacaatttttttttttttcttgagacggagttttgctcttgttgcccaggttgctggaatgcaacggcacgatctaggctcactgcaacctctgcctcctgggttcaagtgattctcctgcctcagcctcttgagtagctgggattacagccatgcgccaccacacccggctaattttgtatttttggtagagatggggtttctccatggtggtcaggctggtctcaaattcctgacctcaggtgatccacctgcctcggcctcccaaagtgttgggattacaggtgtgagccaccacacccagccgaacacaatttttttaaaaagccccaagaatcattaacttcttctcccatcctctttttctttccaggacattttttttatgtatgtgaatgtattgtgggcatcattcttgttatttacctgagaacttctcaagaggcatggcaggttgaagaattccatgtgtcaccatatatttgagatctcttaagtacattttttagtttcccaacagccactcacttttcagggtggatttggaagagagtccttccctgcagtggatgggaggcgggggcacctggtgcttctagtcctcattccctggtttcattattattcattgttcccttggtaaggaaacatatttcaaagtttcacattttctgttaatatttatcaaaataccacagcagttgtatcatacagcagcagaaaatttcacaagttctttatttttgttgactttggaacctatgtctgatatcttgatgaatctttataggaaagaagaaaatgctaaaagtcatcttcatttaaaaaaaaatagattaattaacatctaaaagaattaccagcctctcaataggtggagggatcttggaaccttattataaatgtgttcattctaagcatggatctaacaataaagtgtagtgcagcactactcaaagggtggtccttgtcctggtgccagtatgcaacaaaataagtatataaattgagagtaaggatttagaaactcgtgggtaataacagcgtaaatttgtctgttgactccaataacaacttttgacttttactttgaatgcctttattccccagtgattcattttcattgcactttgtaaaagtattgatctgcgctagactgcaggtgggtgtggttggcaggaacaatgctgatcctccatcacagttcattcatgtaacacttgggtatttaggtgaaaaacacaagccgcaagcaccgatttttcatagccgtgggtgtgagtcctggatatgctatttaccggctgtcgaacttgggccaattagcaagtctttctaaaggtcatactctctatcctgaaaatataagtaaggtggtactgttctttgcagggttgctgctaggattagttgagatgttataggtacatctgcagagttactgcatcagggttcagccaactttggcagtcctgggaagaacacgagtgtggtacttggtgcgtaataaaatttaataaatgtttaccatgatttgcttttaagtagaatttgtatatgccttatagcctctctgagggatattgggaaacaaaattcagtggtagcctcatttaggtcacacatttacaaacctctctcaggacatggacttgaaggaaaagtttatgtttaggctccaacaaaagtcttttctcaaagattatatctttactggttttctccatcttctatcttctgatggtgtgtggaaattactagaatatgtgtatagagagcagctccagggaacagatgtgcattcttactcatcattagatgcagtgtaacttttgccctgcctcatgaattttgactctactttggaaaaatagtcacacacaacttcttgatagagtttccaaaattagcttccagaactttatacagaagggcacgagactccccacatctctttgcatgtgttatatttcttttttggcttaaaatttgcatatttattattcatgcaacaaacatctatcagaaacatttccagggcctgtcatttgccaacccagtggtagttgccgtagcttctagaaaaatggaagtattttagccagtgagatatgtcagtcaaaataacccaagaagccaggggtggtgtctcaggcctgtaatcccagaactttgggaggctgaggtgagcagatggcttgaggctagagttcgagatcagcctgggcaacatggtgaagcctcgtctgtaccaaaaatacaaaaattagccaggtgtggtggcgcatgcctgtagtcccagctatttgggaggctgaggtggaaggatcatctgagcctggggagtgcctgccactgcactccagtctggacgagggattgagaccctgtctcaaaaacaaacaaacaaacaaacaaacaaacaaacaaacagagatagtggtacttacggagccaaagcaggagatgccttgtaggtattcagaaaatctcattgtcatagacatttttattataacttcatctccaggtctctttcttcatagatttttttaacgcacatttttttcacattttaatctttgaaattgggatatatgtcataattgatagtcacttataatcacttcagataggtagcagttgggacaactgttgtttgtctgcacgtgtatgagtattgaaagggaagcatcaaaactcacaaaataggtgtctatggctcggaagaaaatccaaggaatagtattggagcattcttagaagaaatatctgtgcacttgatgacacaaaggagggcaatgtgcaggctgtagtgatctgcccagtttctcccagctggaagtgaaagggctggtccaaccaatgtctgactcctatcttgtgccttaaaaaactgtatcttggaaaatttcaaatatacacaaatgtagaactaatagcataatgaacacccatgcgtgcatcatccagctttaataattatcaatatcttgccaatcttacttcctctgtccccattttattttttcgttctttcttttcttttgcttgagcgcattaaagcatatgctggatatcatatcttgtcacctgaaaattcttcagtagatatctctaactgataagggccttacctcctttatttaaattccatgccatcatcacatttaatgaaattaataataattccttaatattttctaatatccagtccatatttgcatttccctaattgttcttttgttgatggttttgttcaagtcagaatctaaaagagattcacacattgcattgaattgttatgttgcttgtctccttttttttaattagtcctcttatccccttcctctcaataactttgatttgtgagagaaactggatcatttgctctatattttgaagatggctgttcgcttttttgtggcagtgtttaatttatttctctgtatgggaaaagaaataccttttattcccatcctagttttatgatggaagccgctataacaaaagatagatttacaagagaaaagcaaaccgatttatttaatataagtttcatgtgacatgggagccttcataaggaaatgaaggcccaaagaaatggttaaaccgtgtactttttatgctaggtttgatgaagagtgggaagaggtgaagtatgattggacatatgattgggagtgtgatctaatggtaataaactgggggagggaacttagcaaggcctgtttgttcagcttcttctctgtgtccctgtgtcttcagaggtaaggatgttcctttcctccatgtataaggagggcacctctaaaatggtcttatgacctgctccaggggacgctcaaaaaaatccttccattggttcatgacctgcttcaggagagaacggcagaaggtgagagtgaccttcccgcttctgctgttttcttaaataccaaggtgtcatattttaggaaagcatgtcctgaacccaatcaccactataacctggtatttagtctggagtcttggctagattttatagagattttttaggcaagaatacttcatagatggtgctatgtatgtcctatttcatcacagcatgaaggaaataatgatatatgtccttttagtgaagataacatgagttagttcattcaggtattgtcagactgttctgttaccaagttccctatcatgcttacactgatggttttatgtccactcatagtagtttcctatatctggatataggtcttatatcattaggggatgcaaaatagcagttttctagttgtgtcatttctcctgcatttattcatggagatctataaaaaaactttttcttatcaaccatttggttactctgatatacagttcacataggcaggaaattaattgttatacaattataatttttaattaatgaatgaaatgcctaataacttctatttggtaacattggttaccaactagaagttattaggcattcattcattaacgtctaatgagttttcatgcatgtgtcattatgaagttatggattttaaaaatatatatacatatattttaattatgctttaagttctacggtacatgtgcccaatgtgcaggtttgttacatatgtatacatgtaccatgttgatgtgctgcacccattaactcatcatttagcattaggtatatctcctaatggtatccctccccactcccccaaccccacaacaggccctggtgtgtgatgtcccctgccttgtgtccaagtgatcacattgttcaattcctacctatgagtgagaacatgcggtttttggttttctgtccttgtgatagtttgctgaaaatgattgtttccagcttcatccatgtccctacaaaggacatgaactcatcattttttatggctgcatagtattccatggtgtatatgtgccacattttcttaatccagtctattgttggacatttgggttgcttccaggtctttgctattgtgaatcgtgccgcaataaacatacgtatgcatgtgtctttgtagcagcatgatttataatcctttgggtatatacccagtaataggatggctgggtcaaatggtatttctagttctagatccttgaggaattgccacactgtcttccacaatggttgcactagtttacagtcccaccagcagtgtaaaagtgttcctatttctccacatcctctccagcacctgttgtttcctgactttttaatgattgtcattctaactgatgtgagatggtatctcattgtggttttgatttgcatttctctgatggccagtgatgatgagcattttttcatgtgtctgttggctgcataaatgtcttcttttgagaactgtctgttcatatccttcacccactttttgatggggttgtttgatttttttcttgtaaatttgtttaagttcttggaagatttctggatatttgccctttgtcagatgggtagattgcaaaaattttctcccattctgtaggttgcctgttcactctgatggtggtttcttttgctgtgcagaagctcttgagtttaattagatcccatttgtcaattttggcttttgttgccattgcttttggtgttttagacatgaagtccttgcccatgcctatgtcctgaatggtaatgcctaggttttcttctagggttttgatggttttaggtctaacatttaagtctttaatccatcttgaattaacttttgtataaggtgtaaggaagggatccagtttcagctttctacatatggctagccagttttcccagcaccatttattaaatagggaatcctttccccattgcttgttttttcatgtttgtcaaagatcagatggttgtagatgtgtggtattatttctgagggctctgttctgttccattggtctatatctctgttttggtaccagtatcatgctgtttgggtagccttgtggtatagtttgaagtcaggtagcgtgatggctccagctttgttcttttggcttaggattgacttagcaatgtgggctcttttttggttccatatgaactttaaagtagttttttccaatcctatgaagaaagtcattggtagcttgatggggatggcattgaatctataaattaccttgggcagtataaccattttcatgatattgattcttcctatccatgagcatagaatgttcttccatttggttgtgtcctcttttatttcgttgagcagtggtttgtagttctccttgaagaggttcttcacatcttttgtaagttgcattcctaggcattttattctctttgaagcaattgagaatgggagttcactcatgatttggctctctgtttgtctgttattgctgtataggaatgcttgtgatttttgcacattgattttgtatcctgagactttgctgaagttgcctatcagcttaaggagattttgggctgagacgatggggttttctaaatatacaatcatgtcatctgccaacagcaacaattggacttactcttttcctaattgaataccctttatttctttctattgtctgattgccctggccagaacttccaacaggattggtgaaagagggcatccctgtcttgtgccaggtttcaaagggaatgcttctagcttttgcccattcggtatgatattggctgtgggtttgtcataaatagctcttattattttgagatacatcccatcaatacctagtttattgagagtttttagcatgaaggcctgtcaaattttttcgaaggctttttctgcgtctagtcagataatcatgtggtttttgtctttggttctgtttatatgatggattacgttttttgatttgcatatgttgaaccatccttgcatcccagggatgaagccaacttgatcgtggtggataagctttttgatgtgctgctggattcagtttgccagtattttatgaaggatttttgcatcgaagttcatcaggggtattggtctaaaagtctcttttttgtgttgtgtctctgccaggctttgctatcaggatgatgctggcctcataaaatgagttagggatgattccctctttctctattgattggaatagtttcagaagcaacggtaccaggtcctctttgtacctctggtagaattcggctgtgaatccatctgggtcctggactttttttggttgctaggctatgaattattgcctcaatttcagagcctgttattggtctattcagagattcaacttctttttggtttagtcttgggagggtgtatgtgtctaggaatttatccatttcttctagagtttctagtttatttgcatagaggtgtttatagtactctctgatggtagtttgtatttctgtgggatcggtggtgatatcccttttatcattttttattgtgtctatttgattcttctctcttttcttctttaccagtcttgctagcagtctatcaattttgttgatcttttctaaaaaccatctcctggattcattgattttttgaagggttttttgcgtctctatctccttcagttctgctctgatcttagtcatttcttgccttctgttggcttttgaatttctttgcccttgcttctctagttcttttaattgtaatgttagggtgtcaactttaggtttttcctgttttctcttgtgggcatttagtgctataaatttccctctacacactactttgaatgtgtcccagagattctagtatgttgcgtctttgttctcgttggtttcaaagaacatctttatttctgccttcatttcgttatgtgcccagtagtcatttaggagcaggttgttcagtttccatgtagttgagtggttttgagtgagtttcttgattatgatttctagtttgcttgcactgtggtctgagagacagtttgttataatttctgttcttttacatttgctgaggagtgctttacttccaactatgtggtcagttttggaataagtacgatgtggtgctgagaagaaagtatattttgttgatttggggtggagagttctgtagatgtctattaggtccacttggttcagagctgagttctattcctggatatccttgttaactttctgccttgttgatctgtctaatgttgacagtggggtattaaagcctcccattattattgtgtgggagtctaagtctctttttaagtctctaaggtcttgctttatgaatctgggtgctcctatattgggtgcatatatatttaggatagttagctcttcttgttgaattgatccctttaccattatgtaacggccttctttgtctctttgatctttgttggtttaaagtctgttttatcagagactaggattgcaagccctgccttttttgtttgtttgttttccttttgcttggtagatcttcctccatccctttattttgagcctgtgtgtgtctctgcatgttagatgggtctcctgaatagagcacactgatgagtcttgactctttacccaatttgccagtctgtgtcttttaattggagcatttagcccatttacatttaaggttaatattgttatgtgtgtatttaatcctgtcattttgatgttagctggttatttggcttcttagttgatgcagtttcttcctagtattgatggtctttatagtgtggcatgtttttgcagtggctggtactggttgttcctttccatgtttagtgcttccttcaggagctcttgtaaggcaggcctggtggtggctaaatctctcagtattggcttgtctgtaaaggattttatttctccttcacttgtgaagattagtttggctagttatgaaattctgggttgaaaattcttttctttaagaatgctggatattggcctccactctcttctggcttctagagtttctgctgagagatccgctgttagtctgatgtgcttccctttgtgggtaaccggacctttctctctggctgcccttaatattttttccttcatttcaactttggtgaatctgacaattatgtgtcttggatttgctcttctcgaggagtatctttgtggcgtctctgtatttcctgaatttgaattttggcctgcattgctagattggggaagttctcctggataatatcctgcagagtgttttccaacttggttccattctcctcatcactttcaggtacaccaatcagatgtagatttggtcttttcacatagtcccgtattacttggaggctttgttcatctctttttactcttttttctctaaacttctcttctcacttcatttcattcatttggtcttcaatcagtgataccctttcttccacttgatcgaattggctaccgaaacttgtgcatgtgtcatgtagttcttgtgccatggttttcagctccaccaggtcatttaaggacttctctacactggttattctagttagccattcatgtaatcttttttcgaggtttttagcttctttgtgatgggttcgaacatcctcctttagcttggagaagtttgttactaacaatcgtctgaagccttctctcaactcgtcaaattcattctccatccagctttgttcccttgctggcgagcagctgcgttcctttcgaggagaagaggcgctctgatttttagaattttcagcttttctactctggtttctccccatctttgtggttttatgtacctttggtctttgatgatggtgacgtccagatggggttttggtgtggatgtcctttctgtttgttagttttccttccaacagttaggatcctcagctgcaggtcttttggagtttgctggaggtccactccagaccctgtttgcctgggtatcacctgtggaggctgcagaacagcaaatattgcagaatggcaaatgttgctgcctgatccttcctctgaaagctttgtctcagaggggtacttggctgtgtgaggtgtcagtcggcccctactgggaggtatctcccagttaggctacttgggtctcagggacccacttgaagaggcagtctgtccattctcagatgtcaaactccatggtgggagaaccactgctctcttcaaagctgtcagacagggacgtttaagtctgcagaagtttctgctgccttttgttcagctgtgccctgcccccagaggtggagactacagaggcaggcaggcaggcctccttgagctgcggtgggctccacccagtttgagtttctgggcctctttgttttcctactcaagcctcagcaatgatggatgcccctcccccagcctcactgctgctttgcagttcgatctcagactgctgtgctaacagagagcaaggctccgtgggcgtgggaccctccgagctaggcgtgggaccctccgagctaggcgcgggatataatctcctggtgtgccatttgctaagacagttggaaaagtgctgtattagggtggggttgttatgattttccaggtaccatttgtcacagcttcccttggctaggaaacggaattccctgaccccttgcactgcctgggtgaggcaatgcctgccctgctttggctcacactccatggggtgcacccactgtccaacaagccccagtgagatgaacccggtacctcagttggaaatgcagaaatcacctgtcttctgcgtcactcaagctgggagctgtagacaggagttgttcctattcggccatcttggaacctctccctgttgttctaaaaaaaattttgtatgttttaatttgtttctgttcttaacctttttgatgctcagatattcccttcctaggccagtgggaactccaggtatccttactttttaaaaaaaagtgtttaattttttttttttttgagtcagatgctcactttgtcacccaggctggagtgcagtggcaccatcttggctcactgcaacctctgcctcctgagttcaagcaattctcctgcctcagcctcccaagtagctggcattacaggtacccacgaccacacctagctaattttttgtatttttagtagagacagggtttcaccatgttggccaggctggtctcgaactgctgacctcgagtgatccgcccacctcagcttcccaaaatgctgggatcacaggtgtgagccactgcaccctgcctgtttaaatttttattgtgtaaaatgtcaaatatatacagaactagagagaatatgtgatcaattctcatatacccatattctgttttaaaaataatcagctcatggccagttttgtttcttttataccccaacttacctccgaggttccatactgcttatgatttcatctttgaacactttaagtttcaatcctgttgtcctttaacttccatcttactgccctacaagatgtcccaggtaggttatatgcttttaaccatttaatttacttcattaattaaccagggtgatactagctgctttagcattatagactccaaaatgtaataatggcttaaactaaatggaagttttttttcatttacgtaacagtctggtatcagtgcttctgcaaaagagttttcttcctgggatatttcatatgtctcccatcttgtgtttctgcctttccctaggtccgtagtgctatctacatccagacggtggaagggagagaaagagaaagaaggtaaaaccatttcttaaaatacttaacagaattggcacatatgccactggctaaagtcacctggccacacaagcgggtctgttcaaaaataataaatatttagaaggagagatatatgaatttttggtaaacagccttcagttctcacattatactgcactatactttcaagaactacacaaagattttgaaattctcacttttttcattattatcataattacttttgttatatctttaaggtattgttctggttcataacatgcattttattagctcaaaagaattactgctttccaagtaagggcattgagggaatcagtgatgtataagccttgagttgagcggattttttttttttttgctttattttttaaattgtggaatcatacctgtctataaattatagatgggcatttctatcttcgtaaggaggaaagggtagatatcagcaattgtgagtttgtcagatttctgaaaaagtaggaattatatcagtaaaaagaagggctgattaatatccatgatcacacataggtagaaggtcaaatagtgttgctaattgatagataaatcaagagacccaagaggaatgatgactcgcacagacttgatctccatttcttaggaggtgcggattctcggtagtcttgtaaatttttttttttttttagatggagccaggctctgtcaccaggctgcagtgcagtggcgtgatctcagctcaccgcaacttctgcctcccaggttcaagtgattgtcctgcctcagcctcctgagtagctgggactagaggcgtgccaccacacctagctaatttttgtatttttagtagaggcagggtttccgcatgttggccaggatggggtcgatctcttgacctcgtgatctgcctgcctcagcctcctaaagtgctgggattacaggtgtgagccaccgtgcccagccagtcttgaaaattttaatatgaggttattaaaccttgttttagtaagttctaaactgagttgagacatccagtgtccaagatgcataccagggcagagaggggatgtcctaggggaggaaggggaggcagggaaaatggctgccaaggataagaagccccatctctgctatattgctgatttatggacatgctccctccctgaggggttaccagtcaggcctgggccctcagctggttatgggctctctgaagaggcaaagagtttccatcgggggaataaggtataagtggctcttattgtgttgttgccatatgatttgaaggataactgaatagggatgggatgtctgaaagtgttcttctgctagcatatacccatgcttcatgtgcaaatgtttaatagaagcaacagataccacacacatctccactacccttgggccgtgtgtagtctgcttcattctgtgtagatcccttcatcaagttaaagattaacgattagaaaactctgtgttgcctcaattcaaacatgccaaaatattaacattagagtattttaaaaaacagtgacaatattcagattgatgtgctatttaacaaattagatagtctagcttataaaaattcatctttctttaagggatttaataaaaccattatcattctggatagacaaataaattggtggcctatcaccttatccatttttcctaaattgctctttgtgcaaaataaggtttgcactgatcatgctgatcctcaatagtactttcaatccaatgtttaaaaaacaaaataaggcggaggaattctctgggtctgtgaaacttgatttaggtaacaggctatagtagatgctggtatgtgtttattgtgattcagcaaatgttttaggtcatatacaataatctaacttttacatttgctttcttttgagaaggttttattccaaagaagcttaatttggacatttaaaggggagagtaaggtttcgttaaacccctttgaggtttgcaaatgccctttctcattcaagaaaaaccacagtattattcaccatgattgagacccacaaggacttatttcattctgatgctctttctttgctactgtaagtgatgtcacttgaattacaaagaggagtctggctttcagaagaatcttcaagttagtaataatattctgttctaagtgctgttgtggcccacagttgatatcccttacaagtttttttgtttgtttgtttttttatactttaagttccaggatatgtgtgcagaatgtgcaggtttgttacataggtatacatgtgccatggtgggtgctacacccatcaacccgtcatctgcattaggtatttctcctaatgctaacccccgcagactcctacccctcaaataggccccggtatgtgatgttcccctccctgtgtccatgtgttctcattgttcaactcccacttatgagagagaacatgtggtgtttggttttctgttcttgtgttagtttgctgagaatgatggtttccagcttcatccatgtccctgcaaaggacatgaagtcatccttttttatggctgtgtagtattctatggtgtatatgtgccacattttctttatccagtctgtcattgatggaaatccctcgcaagttttaaagaatatagggcacaagggagcaaaatacaatcagaaatattggtaagaattgtaagactttctgtatataagtagatctcccagtaaggatttcacgatgtctaaagtaacctttctgtaaaatgttgttgtagtaatctctataaaacgttcatgtttcttactagatacaagggtagtctttgtcaaaatggtagtgctggtggtagcaacagtagtaggagctaacctgagcatttgctgtgtgtcaggcaccacattgagtgtctttcatgattacatcagtatcttggaaattgcggccaattgtagccttcctgatttttgctatttcctcatataatctttactttatatatatatatttttaagtgatcccctttaaattattatggaagttttccaaatatgcaccaagtagagtgaatagtgcaattaatttccatattatctaacacatagagcaggcttcatgtgcatgcagcctgagagttgttcagagcccatggcttatgaaggcccacatttggtttaatgtggttatttggttcttctgtcactgttttgaaattcttaagcagttataagagaccctgcatttttattttgctctgggtcctgcaaattatcaagcaggttgtatacctagattcaataatcatcaagatttttactacattttcttcatattgtctttttccctcccctcctttctttttctcttctgaagtattttaaagcaaattgcagacatcacttcactttactctgatgtatttcagaatgcagctgtaacaaatatgggcatttttgtacttaagcacaatgccattattatatcaagcaatataaacagtaattatttggtattgtctaatccagctccacattgaaacttccccaactgacttgaaaatgtcatttactgtttttccttattttcatattcaaacaaattcaaacattatattacatatgttccttaagtctcttaacctagagaaatcctgcctccattcccactgtagacttgttatagaagcaggatcttttgttctgtaggaagtcacacattctggtttcatatgctcttctttaatgtgttccttcaccactcttattttttcttaagggatgctgtctctaaatttgatttaacgtaaatgtttttggcaagaatgctttgcagagggtgtctttactacgtttattaggaagcatccactattcagaacctgttttattgaagctgagattcatcattggttttggcaggtaacagactgactattccattttaaagttccatattaatttttcatgtgattgtttcttcaattgatgattgttacttaaatcaattatgtcattaagtaattgcaaaaatcatgatttctaattctgttaattattttccatttgtcaactagactttttctgtaaagaactttccctgactgactaggactgtttggagcgcacttcttttccttgacttagatttgtcctacgcaataattttagtgtggtgttttagtcccttttgtgctgctataatagaatatgtgagactgggtaacttataatgaatagaaatgtatttgtctcatggtcctagaggctgggacatctaagatcaagggtctgcatttggcaaaggcctacttgatgagtcatccaatggcagaaggataaaagacatgcacacatgagtgagggaaaaaggcctaactcattcgttttatcaggaatccattctggtgataactaacccacttctctgataacataattaattcattcatgaggccagagccctcgtgacctaattgccccttgaaggacccacctctgttgcactgggaattaagtttccaacacatggactttgggtgacacattcaaaccatagcatttgatgtgctaattatatatattttaatatgctgggaattaaacacataattgttaacagaagaagaaaaccactcatgtaccatctaatatcatctggtatactcccagtggtatatgtgccaggctttgggaaacactattatttttcttgctttacagttgaggaaacggagagaaaataaggttaagcgacactccctgggtggattttagctagaatccaagcactctgacaccagagccaagcataaccactccagtcttgtagcgcttttctaagcggtcaaagtttgcataaaaaaagcagactgggccgggcacggtggctcacgcctgtaatccgagcactttgggagaccgagacggatggatcacgaggtcaggagatcgagaccatcctggctaacacggtgaaaccctgtctctactaaaaatacaaaaaattagccgggtgcagtggcgggtgcctgtagtcccaagtactcgagaggctgaggcagtagagtggcgtgaactcgggaggcggagcttgcagtgagcggagatagtgccactgcactccggcctaggcgaaagagcgagactccatctcaaaaaaacaaacaaacaaaaaaaaaaaacaaagcagactgatctttgaggtgaaaccacgaaggtaattttttaatggcaagtcagtgagaaagcccagaactctcgggtaattgatctgtgttctcactttcagctggtgccacctccatgaccagtgtgatttattgtgctcaccggtttaaatcaataatctgagtatattagagcctagattgacctaataaactcctcaaacttccccaacataatgctttgtagcttctggatgaaatgcttaaaacattttttaatcttttattattcttaataatataaaactcatctttacaagacaacagatagaaaccactattgtttttcaaaaggaaaggtcattataataccagcctagtctagtaaaagcagaatgccaagcttttgggtcaaattattgttcagccccttcaatgataagaggaacatttgaagtgcccttggatagtttctatactacaatctgaacactcggttagtgatatagtttggatgttttgtctcctcaaatctcatgttgaatggtaatccccagtgttggaggtggggcctggtagggggtgattagatcagggggggctgatccctcatgaatagcttagcatcagtcccttggtgctatccccacaatagtgagtgagttttggagatctggctgttcaaaggtgtgtggaacctaccacactctgttctgcccctgctttccccatgtgaagtgcctgctactatttcgccttctgccatgagtcaaagctccctgaggcctccccagaagccgagcagatgccagtgccatgctcgtacagcctccagaactgtgagccaattaaacctctttataaattacccagtctcaggtagttcttcatagcaatgtaagaatggcctaatcgagttgggaaacttagatacagctttaaattttgagcattgtctctaaccatttcatttgatttgccctttcacatcagagaaatgaaactgaacacctttgagggattttatctattggaatatgcatgctaaacattactgaggagccagaagagtgaggtggagggactaactagagtaaaagcagggcctaccttccaaatttactttttactggaaaaaatgtcacatcatcactatctgacaattacttcttcttggataatattttaaaaggagatgttatgtcatttatggaattttaaaccctcaggaataatttagtctaatcctttcagtttacatatgagaaagctaaagccaagctaatttaaataatttctcccgagattaccagctaattagatgcagacctagaattagacctcaggctccctgactgacatactaaggtaccatatcaattaaagttatgtgattgcaaacaacagaaactaattctgactaacttgtgcacaagagggatatatgcaaagtaaattttgggtagtttaacaaaatctagtgtcaactgtaatgtaatttttttggaggagaagtgaggactagaaatagttaagtaatgtaaaatgtattttacatttaaaagatcagaattgtgacatgtgaaatgcaaaaaatatatgatttaaaaatttattaagataagagtcatataacaaaaaatccattttaaagtgagcaatccagtggcgtttaactcactgacagtgccgtgcaatcatcatctctatccagttccaaaacatttccatccttctaaaataaaactcctcatttcaatgcagcttctcctcatttccccaaacccttgtcagccaccaatctgtattctatctatgtggatttacctattctggatattttatgtaaatggaatgatacaatatatgatcttttgtgtcttgtttctttcacttggcatgttttcaaggttcacccaggttataagatgtatcagaagtttattcctttcttagggctgaataatattgcattgtatggatatattacaatttgcttatcctttgattcattgatgggtgttgatggacaagtgggctgtttccaccttttggctattgtgtatagtgctgctatgaacatgtatgcacaggtacctgttttagaacctgttttcaatccttttggatatatacctaccagtgagatttctggggtacatggtaattccatatctaaatttttgagaaactacaaaactattttccacagtggctaagtcactgtatattcccaccagcattgttggagagttccagtttctctatatctttaccaacatttgttattttccattaaagaaaataatagccatcctattaggtgtgaagtagcatgtcattgtggttttcatttgcatttccctaatgactaatgatgagcatcttttcaggtgcttgttggctatttgcatgttttttctggagaaatgtctgttaaagtcctctacccattacctggtttttttgttgtttttgtttgtttgtttttattgttgttgagttgtaagaatttcttatactgtatattctggatactagacccttgtcaaatatatgatttacaaatatgttctctcactctgtagattgtcttttcatttttttgataatgtctttgatgtaccaaggtttctaattttgaggaggtaccacttatctattttttcttttgttgcttgtgcttttggtgtcatatataagaattcattgccaaatgtgagggtaatgattttacccctatgctttcttcaaagagttttacagtttagcacttatatttagatcattgctccattttgggttaatttttatatatggtgtgaggaaggggtccagctttattcttggcatgtgtggttattcagttgttccagcacaatttgctgaagagattattatttcttcattaaatgacttggtaccttagttgagcatctatgtagatcatgaaacttcagagtgtctcccttgtggagtttgcttagagtcttgctatagtagaaagaatgttggtaggcagcaaatatccactatgcagcccagccactgacccatctttgtgtgaaattctgatatacacagattttcttctgttgaattttcagcaatagtgacctgcaagaatttcagatttgtgtgtttgttaatttaggataattattaaaagaaagacctggggttggagtattaaaaacagacataaagtggaaggtagagtaagaacagagtttttctattcaacttgtctccagggtctgtatacatactggagtctttccttctgtgccaggctgtccaatagaaatatactgtgaaccacagatgtaagccccatatgtaattttacattttgtagtagccacattacaaggagtaaaaagaaacagatgagattaattctaataatatatttcacttagccaaaaatattaaaaatattagttttttccctgtaatcaatataaaaaattattgatgaggtattttacagtttttttcctactcagtctttgaggtctggtgtgtattttacccttacaccatgtctgaatttggataaggcacattttatgtggccagtggctactatattggacagtagaatttatatcaaaagcagccatagacaatatgtaaacaaataactggctgtgttccagtaaagctttgttaacaaaaatacgtggcaggacacaagtgatggttaattttgtgtcaacttgactgggctaagagatatgctcattattcctgggtgtgtctgcgagggtgtttctggaagagattagcatgtgaatcagcagactaagtaaaagtcaccctcatcaaggcgactgagcatcacccaatctcttgaggacgtgaatagaacaaaacgtgcagaaatggcaaattcactgtctctgtttgagcaggtatatccatcttcttctgtcctcagatatcagagctcctgtatcttgggcctttgatccaaagggacttacactattgactctcctggttcacaggcccctgggcttgggctggaactatacctcctgctttcctgggcctccagcttgcagatggcagatagtgggtcttctcagcctccataatggcatgggccaatccctcacaataaatctctttctgtatatctacatttatcccattggttctgcttctctggagaagcctggctaatatactgtctttggcttgtaggctctgttctaggctgttccttttagctctgtttgcaacagagaggatcttcttttccccaaagctgattgtttaggtctattagcccctttgcttacttccagtatcttaatatgtctggcctctgggaatgtgttttccctgctccttctggttttgctgtgccagaaatgaggtgggatgaagaatgcttcagttcttaggggtgacttctgtgggtggatgagggaaatgaaagaagctcttaggtgctctggcttcaggatagagaatataaaacttactgcttacatacacctcttaccctgtgaagattcaccttctggtagtacaccttatgttccttatcactctaaaacagtctctgaatccttcccatccatgaaagacctcttgaggtctcctagctctggaaggttcctggctccaagagggagccatgaggaggttaaaactgaaactttaagtttcatgtggacaagtttactgtatgtaaagttctgtatttttagcagacagaatattatttacctgtaggagttcctcaacacatatttgttgaatgaatgaaggaatacacgaatgaactatcaaagcagctccagttctggactccaatcactgacgttggtaataatttggttgctaaaatctcctcttatgttctatagctcaaaaatgctatgcccagatgctttaaaatgatgccagttgattcactcaccggccatgagcatctgagcagttagttcccaatgacccaacatgccttgatttattgttcatttgatttaacttacagaaggtgaacttactttattttcctgccagaattctggctggatcacagttggtggtggtcctcagggaataaatctcaggcgatggcgctcagtcattttagggttgcctgttcagtataacttccatgtggctgtcttagtgaacacaggccttgaagctgatgatggcattttgtagacaggctacagtgacctacagttcatagaacagtagctggattacctacaagataacaacattctcacttgtgggtaaaatgtgtcattgtttctgggaactgaactttgaaaaataaataaaaatccctaccttgattcccaaagctttgacatttaactgggatgttagagtagatgaattcaatttacatgagttggggtaaaaaagaaaaaattgaaactatttaacagattttcatctctttctctctataaagtaatcaacaaattttcaggttgagacactcaagcagagttccaccttttgggcaattgggcaactctgattttgcattcctcaggatttgctgaaaagttttatagcaaagatggctactggttctgggtggtaacctgtaagaccttgtgactctgcatattcatagaggattttgaaaaagtatctgaattttacagtgataaattttaataacttgtttgtgtatcattaacaagcttctcatggttaccaaaacttgtaaacaaagtcattttgccactgcagatagtatctttctacatctgaacatgaccttgaattaaaaaataataataacttttacttatagtcattttttgctgaacgagaataacttttgagatcgggttgaagcatgttacctgtctgctcaaaacactgcaaggaccccttatttcgtttcatgtaagtgctcaaatctttgacaatggataaggaagccctttccatacccaggatccatactcctctgttctcctaccattttacttgccttctccccttactctcctgcagccacatgggacccttgctgttatggaaacagacctgccctagggcttttgcacaggctttaccctttgaaactacccccctgcccccatcccgggcagctcacggcctgcctctcctttaatgtaactttttcattgaaactaccagacctgccatatttaaaattcctgtctttccatcctcctgatccctctaaggctgctttgttttttaatttttgtccttagccttgaactgtccgtccaacataccatttaactgagtcacttatgtttattgtatctgctttcccaccactagaatctaaactttgtgagtacaaagatctttgtcttctttgttcagtgatgtgtccaatagaagtttctgtgatgattaaaatgtatatggcagacattagccacatgtgctaattgagaacttaaatgtggttagtgcaaataaatccttgaattttaattttatttaattttaactaactgaaatgttaatagtcacatttggctagtggctacataccataaatgacactgcagatctcgcaaacgtattgaatgaacgaatgaatgtctctttagagcattgcttctaatactttaaaggaattacctggggttcttgttaaaaatgcagattctggccaggcatggtggctcacgcctgtaatcccagcaatttgggaggctgaggtgggtggatggcttgaggccaggagttcaagaccagcctaggcaacatgaagaaaccctgtctctactaaaaatagaaaaattagccaggcgtggtggtacatgcctgtagtcccagctaatcgggaggctgaggtaggaggatcacctgagtctgggacgcaaaggttgcagttagctgagatagtaccactgcaccccagcctgggccacagagtgagtccctgtctcaaacaaacaaacaaacaaacaaaaatgtagattttgattcaggtctagggtggagcccaagagcctgaggttctaacaagctcctaggtgatagctctttacacttttcatagcaaggctctggaagactaatattgccttgcttttagtttgtgtgtttattaaaatagaccaagcagttcctcttttcctggacaagagggattactaagaataacctgttagactcaaataacagttggtaggcccaaaagaccaccaaaagaaaaaaaaattcctttgcttctgataagaatgtaattctcttcctaccttttctctctaatttggttgaactcagttgtggtgcatttagaaactttttggtaaatgctgtttttttgtatgacagtttgtagctgcctaatatgcctgcctgacttgcagtccatttttttcaggtcactgaagatgtgtccctcacaaagaatttttaagtggtactggatggcttagttttgcatcctcctattatctgagctagccggctaaatcagattcccacagtaaaaaaatctcatcaatcttccattgttataatcacattgttcatctacagaataaacatcacctagttattccctcggggaggagtttaaatcttgttcatacgcgttagattgcttcaaacccttggtcgttcttaattatcatgtgctcttttccaggtggttttttgtcagagcagtaaatcttggtacagatcaattttaggtgttgttagtatttaacaacaattaaggtactgatgaatatatgtaatattgcctgatttatcattcccttataggctcttcaaaatatatcagagacacaatttacagtacctgtcagaagaaaaagggtatcatcttaaaagcctgattttgtttcgtttttctcagaagagcatgaggaatgagtgtatatttgaaccattctggaagagccttggtctagcctcagtctttatttgctgtagctgtgcctgacctagacctccaggaatattctactacctcaggactactaagtgggcccctgtatgtaatctctgtttttttttttctttttttttttgttggtggggggtgcttattttcttccttctgcctggaatccctctgtctagttcctgcaccctcctagtccccaaagtcagccatttcaactctcaaggctatcaacaaccatcacagtagtaggtaatgttcattgagtgagcacttttgaattatggggcactggggtaagtgtttcacagatgttgtcttatttgatcctcactacagtgctctgggtcaggagttactattctccttttttagattaagaagcagaggcttagagaggccaagtaacttggacgtgttcacacagttagtgaaagagtctgggtttgagcacaggctgcctgattctagaatccttcttcctattatgccatactttataggtttctccttctccctggaacctgcctccttgcccttgcttcttttgaggcaggtgagactggtgccattaaccaggacctgaagtgtaaactcatgggatctctcccttgtcatcccatagcacgttgtatctatcagtgctgtgccttttatattataggtttatgtgtttgtcctccctgctcaactgtcttggaggcaggaaggagccatatcttacttctttgtatgtctccatagtttttgtgaattgtagaaagctatcttgactttccctaagttgcgtttccatagaataaatttttctgtaataatggtggaacttgaagctatgagcctacttcatcattgtgcaggataggaattgccaacatagtatatttaaatacaatgatctaatttggtagccttacctgaagctaaaaccatttataacccaaccttagtgatttgaagatgagcctagggctctgcttaagagcttctaggttcctcttagtttaaaataatggtcaatttagtggtatgctggtaaatgtttaacagctggctctcaaggaaaaatatgtgtatgtgtgtgcatgcatgccctaatgtgcatgcttgcatgtgtgtttattattaattttactgatataaaggacatgtaacatgtaatttataaatatgaataaaataatcactactcttgattgtaaatcctggatagccagtagattctcacacactgctttggttgatttttgccaaattcttatatccatagccagtctatgtttgcaactgatgaataatcatctttctgtcatacatattgtatgatagtttataatactggaagaatgggttctccatttgtgtgtgtgtgttattcagaatataacagccacagatatggcacactttaagttaatctgcatattctccatcactctcaagtcaacgaaatgatattgagtcttgatttgtggcatttgccagtttggctgatttcaagctaccaatgtgaatttactgcaagtgaattaggaagagatacatgtagcactctattatgtagtgtttccactctacaaatacaataggtgcaaataagcttaaagagtatagataataaaagtataagggccgggtgcgctggcacaagcctgtaatcccagcactttgggaggctgaggtgggtggatcacctgaggtcaggagttcgagaccagcctggccaacatggcaaaaccctgtctctactaaaactacaaaaatttgccaggtatggtggcaggcgcctgtaatcccagctacttggaaggctgaggtaggagaatcacttgaacacaggaggcagaggttgccgtgagccaagattgcgccactgcactgtagcctgggcaacagagccagactccatctcaaaaaaaagaaaaaagtataaggacatgacgagcttcatatatttatttatttaaaatatttttatttaattgtaacttttatattttaatttgtataattctataataatttaaaataatgtctgtgtttaacagctggtatgcaaagttactgaaatttaccaattgcaggtaagcctcagggaggcagctccagtaggcaactgtttcaatccaactcaaaagtggtgtttggttatcagagctaggatgtgggaaggtgaggtttgaattctagctctgctttttactatcagtttaaaaattaaattactgtttgttaaagctcattgtaagctttagcagcggcgtccaatcttttggcttccctgggccacattggaagaattgtcttgggccacacataaaatacactaacggcaactgatgagcttaaaaaaaaattgcaaaaaaaaggtctcataatgttttaagagagtttaggattttgtgttgggctgcattctaagctgtcctgagctgtgtgcagcctgtgggctgcaggttggacaagtttgctttaaagtattttataaatcttaagatttctatgatcaggtaaggctggcgaaaaaaagtgcagcaatgttggtgggtattctctttgagccaggcgccatggtaacagctttacatgcattatcctgtttcttcttgacttcttgtgagtaccattattattgtcgttctatagaagaggaaaccaaggctcggagagaattggaggtacactggtcagaggtggagctggcctcagacctaggccccccaaacactcttggcttctgctaaggaaagcagaaatgagaggaagcaaaaaacagcagacagagagtacaaagctgactcctttaccatatttctcctcttttactcttcattcttcttcttgaagtgggcgtagtggtgggagatggcttttttcttctccctgagcataaaatcatttcatgcttgttgcagaacagcagaaaatgcacaaaagtatagatgtaaagataaaaatgatgtatgatcctatcacccagagaaccaagattttaacatttagaaatatgtaccaataaatttttgtgcatataacatataaaatgaaaataatatataatagggtaaacatcaacatatacttttatttaacaattatttctttccattgttatttcctgaatttagaaagggtagctcttttgagaacagcagcccttagctatttggaaagtaaaacttaggagctagaactacagtcacaaaagctacgtagaatcaccaaaccttttcctattattccagtttttccctcacataagatagtcaccagatatattaacaaacagtacctgagtaatttgagcttaacttccatttcttacttttctcccttccttggtagatgggaagtaggagagtcaaagtttagatggtttgtaaactcaatatttatttattggataattccgtatttgatctaacattaagaatattttccatatttctgtgtctgatctgtaaatctgaattctgttagtgccttgttgataaggaagagagaagattttcatgttcaatgtgcttatccattcaaagggtaagagcaaactaaaattcattccttggttcaagctggagtttcacacatttagcactttggagacattgcccgtgaagaacaaaatcatatagagtgacatttggtcactgacctaactaagggtacttttggggcctttactctactgcagcaacaatcatatttgaccacaatcagtgaaacgtttagccttttacattcagttgtgtgatcagggaaataatttaatacgctctgtcctacagcccataacatataagtcctgtgtggtttggcctaataaatctttatccctgtcttgatcttcggatgtctaacaggtcatattattctgaaagaaatgttttcagattttgcacataagaatatgttggtcatttttctgtttaaggtaggcaagctatatagggatgaaaacacaatgtctaactggaaatggagagtggagagaaggtgaaaaagggatattttttgctgacagttcatagatatagacaaggtaatgtctaaaacgtatctttacagcttttataaacactgtcttgaaaacaatggtatactgtaaggttagtgctcagaaaaaaaaaagctgtcacttgtacattaatcagagttgctctataaagaatgtttcctgagaaactagtggttactaacagaagcaatgtttagcatattttattttacagcatattgttaatagctatgatcatatttcattttgaagataaactttaaaatcataaaatgcgttgtcttttgaaatattttggtagcttcatttaaattacagttttgttacagtatttattcaactggcattgttagactattccatctttatatatttagtcataaccagcttcttgacaatgtttttctttctttgcctgtactttgctcatacatacaaatgtaacaataaacctataattatatagaatttttttcttaaaaagaaaaagaaaagccaaacagaagctcttcccttaagaaataaaactcagcctttgcaggaaatttaaagcttaggagaattcttagctcagcctctttgaagacctaatcttaccagttttctagtgttgagtggaagaaagtttgtatttaaacgttgcctctctattgtttggctaggttattttgttgggggagaaggggggaaaacagggttgaatgtcatataaaagtcttagtattataatttctttagaaagtcctttgaagctttgctttctccctccttttccccctcactagcagatttttaagagttactctgtgtaggttgttttgaaaagatgcgaagttatattcttgggtaacaagaatataactctcatgagtagcagaagctcttctgcttgcatcacaaatttacattttgtaaaatatactatgttatttctccaatttgattggcttttataatactgtccaacatgaaaatagtatgaataatttaattagatcccatttgtcaattttggcttttgttgccattgcttttggtgttttagtcatgaagtctttgcccatgcctatgtcctgaatggtattgcctaggttttcttctagggtttttatggttttaggtcttatgtttaagtctttaatctatcttgagttaatttttgtataaggagtaaggaagggatccagtttcagttttctgcatttggctagccagttttcccaacaccatttattaaatagggactcctttccccattgcttgcttttgtcaggtttgtcaaagatcagatggttgtagatgtctggtgttatttctcaggcctctgttctgtttcattggtctatatatctgttttggtaccagtatcatgctgttttggttactgtaatcttgtagtatcgtttgagatcaggtagcgggatgcctcaggtagtgtgatgccttctttttgcttaggattatcttgactatatgagctcttttttggtttcatttgaagtttgaagtagttttttctaattctgaataaagtcaatggtagcttgatggggatggcattgaatctataaattactttgggcagtatggccattttcacaatattgatttttcctatccatgagcatggaatgcttttccatttttttgtgtcctctcttatttccttgagcagtggtttgtagttctccttgaagaggtccttcacatcccttgtaagttgtattcctgggtattttattctgtttgtagcaattgtgaatgggagttcactcataatttggctctctgtttgtctattattggtgtgtaggaatgcttgtgatttttgcacattgattttgtatcctgagactttgctgaagttgcttatcagcttaaggagattttgggctgagacgatggggttttctagatatgcactcatttcatctgcaaacagagacaatttgacttcctctcttcctatttgaatatgctttatttctttctcttgcctgatcgccctggccagaacttccaacactatgttgaatagcagtggtgagagggcatccttgtcttgtgctggttttcaaagggaatgcttccagcttttgctcatttggtgggatattggctgtaggtttgtcataaatagctcttattattttgagatctgttccatcaatacctagtttattgagcgtttttagcatgaaggagtgttgaattttattgaaggccttttctgcatctattgagttaatcatgtggtttttgtcattggttctgtttatgtgagggattatgtttattgatttgtgtatattgaaccatccttgcatcccagggattaagccaacttgatcgtggtggataagctttttgatgtgctgctgtattcagtttgccagtattttattgaagattttctcattgatgttcatcagggatattggcctgaaattttctttttttgtttctctgtcaggttttggtatcaggatgatgctggcctcataaaatgagtcagggaggagtccctctttttctatttattgtttggaatagtttcagaaggaatggtaccagctcctcttttacctctggtagaattcagctgtggatccatctggtcctgggctttgtttggttggtaggctattaattactgcctcaattacagaacttgttattggtctcttcagggattcgacttcttcctggtttagtcttgggagggtgtatgtgtccaggaatttatccatttcttctatattttctagtttatttgtgtagaggtgtttatgtattctctgatggtgcttttatttctgtgggatcagttgtgatatcccctttatcattttttgttgtgtctatttgattcttctctcttttcttctttattagtctggctagcagtctatctattttgttaatcttttcaaaaacccagctactggattcgttgatttttttaagggtttttcgtgtctctatctccttcaaatttgccctgatcttagttatttcttgtcttctgctagcttttgaatttgtttgctcttgcttttctagttctcttaattgtgaggttagggtgtcgattttagatctttcctgctttctcttgtgagcatttagtgctatacatttccctctaaatactgctttagctgtgtcccagagattctggtacattgtgtctttgttcttattggtttcaaaaaacttacttatttctgccttaatttcattatttaaccagcagtcattcaggagcccattgttcagtttccatgtagttgtgcggtttttagggagtttcttaatcctgagttctaatttgattgcactttggtctgagagacagtttgttatgatttctgttctttttttttttttttttttttttgagacggagtctcgctctgtcgcccaggctggagtgcagtggcgggatctcggctcactgcaagctccgcctcccgggttcacgccattctcctgcctcagcctcccaagtagctgggactacaggcgcccgccgctacgcccggctaattttttgtatttttagtagagacggggtttcaccgttttagccgggatggtctcgatctcctgacctcgtgatctgcccgcctcggcctcccaaagtgctgggattacaggcgtgagccaccgcgcccggcctgatttctgttctttttcatttgctgaggagtgttttacttccacttatgtggtcaattttagaataagtgcgatgtggtgctgagaagaatgtatattctgttgatttggggtggagagttctgtagatgtctgttaggtctgcttggtccagagctgagttcaagtcctgaatattcttgttagttttctctctcgttgatctaatattgacagtggggtgttaaagtctcccagtattattctgtgggagtctaagtctctttgtaggtctctaagaacttgctatatgaatctggattctcctgtattgggtgcatatatatttaggatagttagctcttcttgttgcattgatccctttaccattatgtaatgccctactttgtcttttttgatctttgttggttaaaagtctgttttatcagagactagtattgcaactcctgctttttttgctttacatttacttggtaaatattctaccatccctttattttgagcctttgtgtgtctttgcacataagatgggtctcctgaatatagcgcaccgatacagcacacccacgggtcatgactgtttatccaatttgccagtctgcatctttcaattggggcatttagcctgtttacatttaaggttaatattgttatgtgtgaatttgatcctgtcattatgatgctagctacttatttttcccattaggtgatgcagttttttcatagtgttgatggtctttataatttgttatgtttttgcagtggatggtataccagtttttccttttcatatttagtgcttccttgaaaagaaatcaaagtgaacaggcaacctacagaatgggagaaaatctttgcaatctatccatcagacaaagtgctaagatccagaatctacaaagaccttaaaaaaatttacaagaaaaaaacaaacaaccccataaaaagtgggtgaaggatatgaacaaacacttctcaaaagaagacatttatgtggccaacaaaaatatgaagaaaaactcatcatcactggtcattagagaaatgcaaatcagaactacaatgagataccatctcacaccagttagaatggcgatcattaaaaagtcatgaaacaacaggtgctggagaggatgtggagaagtaggaaagctcttacactgttggtgggagtgtaaaatagttcaaccattgtggaagactgtgtggcaattcctcaaagatctagaacaagaaataccacttgacccagccgtcccattactaggttatacccaaagggcctgtcagggtttgtggggctaggggagggatagcattaggagaaatacctaatgtagatgacaggttggtgggtgcagcaaaccactatggcatgtgtatacctatgtaacaaacccgcacgttctacacatgtatcccagaacttaaagtataattaaaaaaaaagagaaaatcatatgaataaatgaagatgttaccttgacattccttttaccattgtgcctggagactaggtagtctgacttgaatagaacaagaaatgacagcttttcacagagagctctgagtaggaatgtgaaagaggttcatgggagcttgttcctgtgtaatgtttaaagccatagagaaaagaatctgtgtttgcattaaaatatcaaggtataaagagagctaagtgtgctatatagcgttatattacacagagtatgaatgtgaaagaatctacaagttactgcatttttggaacctcattaggtgccactaaaacagcattttctctgtttctgcatatggcaatctattagacttcctattcacggtaatgaagagactcaacatatacttaatgattgggcttattttcaaaacttattattggcttgctgtttccttccttactcccacctgttgcatgcccctaccagccatagaatagtaccttgcaacattcaagacatcaagaggaaaataacacaactaaactattttatactgggaactttccaaatacgttttaaacccgactaatataattctttataaccaatctcaactctttgaactaatctctaatatatttcataacatattgcttataatagagaagacatacatataaatatgaggtaaatatgggtacattgttgctgatatatcagttgttatgatagatttaaaaataagcacacattccttctaagaaagatttctcctaaggaaggccagacagcctaattttttctactatgtaaaaacaggaaaagcaaagtttaaatcagaaattgtcttttaatgtaattattcatgctttatttattccattactgtcaggatgactgccggtttatctcatttagaatctcagtgctagtctgtccagtttattatctttcaggtttatcagttgtgttttactgaagatagacacattaaagtagaatgaggatctaggggacaatggaaatagtttcaacaggggcttaagtgagaatgtgtatctatcccatgggtgaaagaaatgcaaaactaaaacaagaacaaaaattaaaaaaacagacagtgattaaattagaaatgctgtgatttataatttagtataaattagtcttttctaatttggtttgatagcaaagagaaatatactggaaagattctattccattttatctcagtagccttagaaatctttcctttgaactttccttgctggggtgatatactgtgttgatgttctgcacaggctgttacttgtgggcatctgactgtctaaccatatctgagaactacagagagttttgtttcacagtcaaatcccttttggggtcaaacttaggaaaactagaataactgtttagagaaactaaaagttggacatttacttctttttcaaactaatgtaaatggtaatgtgcatgacacttaaattcccaacagcaagttggtttgctatttgctcagaagtgaaggttctagaattctccttcatcttttctaaattggaaaaagaaacaaaaatcaaaactctttctttttccttgattagtcacatgtatcttagtgttgcattgattaaggagtcagacagacatgttttaaagtactggttccatcacttactaggtgggtgactttgagaaagttacttactttttatcatcgtgtttgactatctgtataataaggatgatagaagtacttacctaaatggattattataaagattaaattagatcatgcatatatagtacctggcacatagtaaatgttcaatgagtaattgccattattttaatttttatcagtttgtcttagacctcaagtcctatttttgaatttcagtagtgctgtcactattgactcctctcgtatcttctttttctctttttggtagggctgcccaactttgaaatttgatttgttaccatcttttccagtattttgtggaaattttttctctttagccacttctgtgtgagacagctgttccatttctgtatcagctgattatttcttgtgattctgagtgatattaaagaataaatcaatgtctttatggaagaagataatgcccctcctcattgccaaattcttcacaatgttatctcagcatatcatttatttgttcatttatatctttcctagagatttttgcagcatattagacacccaagtggcaacattgaatgaattttggtccctgtattcagggagtctaatgtgagcacagatatgtccctaatcaaggctaatgggaatacaaattgtgtgaatgatacatcggattcctagaaatgggaaaaacaaaattgtcctgaaacaaggcctaattttttcaaaacttgtgttaccagccttcatggttcttaaatgtgtcctgaagttctcttaagaatctctgaaactgtttttctatcagcttgttttctaactaaatttgctttcctttgagcactaacattcaaaataatgaaagtgcacacacacagtcattatcttctattttatttctattatttgtttattttgagacgaagttccactcttgtcgcccaggctggagtgcagtggcgcaatctcagcttgctgcacctccacttcttaggttcaagtgattctcctgctttagcttcccaagtagctgggattacaggcacctgccagcataccttgctaattttttgtgtgtttttgttagagacggtgtttcaccattttggccaggctggtcttgaactcctgacctcaggcgatctgctcacctcggcctcccaaagtgctgggattacaggtgtgagccaccaggcccagcctctgtattttatttttagttgctctcattactactcttgcattagggttgtttttgtgatattttgcccttgcaagtatacaggtcatcttttgtggagaaacctggacatatacacccattttgttatttctgtctgtgttcctgttactgtgcagactttcagaacagatagtgtttgtaaattgcctgtatgcttcacatgaatttgcctttagtttgtgcacacacataagtaattcacacataaagttcacatgctctggggagccaaatttatgcttgatggttgctatgaaaatccaggacttgtttcattagtgatggagccatggagctgagggttcttgtgaactcttatgctacaaattacatttcccacagaaagaaatgttgaacaaacacaaaggctggtgttggtgtacccggatagctgcaggctcttatctattaatgaccgttgtcataagtaacttttaggacaccaggcaacataaatttatttttgtttaaacaaatagctgcaaaatggtaagttccaaaatcccctgtgtctttaaaataaggcctatcctaaaaccagcatttctttgtcttgctctgtttctttgttctactctcttattttactgttttgacaacgtggtacttatttttgttgttccctgttttctaccctagggataaactcttcattactttttaaaatctatgttccattaatcacgtgatttccatttcatcactcattactgtccttttcctccacttctcctccctctggttttattctgcccatctgctcattacgtaaaatatggttaatgtgatgagaggccttgcctaggaaatcaggtggcttatgagcttcagataatttcttaaatgtgtttacaacttttatgaaaacacatcctctttgggcctgttaggaagtggcctgtacacatggcacagatgttcacagaggcctaagagagtagcctagtgaaggagaaatctcagagcagttatgttgttgaacactttagcaaatagtcttcaccacttactacactgacaaagttttttaaaaaggaagtaaaagaaaaaaagttcctctgaagatctgtattgttcctctgtgctttgacatgtgccagtccttggactgtcctggctttttttccttgcttttcatcccacttgaccctcaagtaaaaaagtaaatacctgcctaccatcacgatgctaaacccaaactcagaggcctgtaattgctatactaaagtggaatagaaaggaagggaaagagagagagagattgaaccacattccttcatgttcttcaccttatttcttattctaataaccaggagttgcattgtatccagctgaatgcataaaattgctaatctgaaccaagttccagagtgctgatttgctttaaaacaaacaaacagaaagccatagtgacattcctgaaggcatgcctccaagttcttaatgtaattacttcttggttcctgagatgtaattaattagataaaaagagatcaagcgtaatccaaaaggatatagaatattttctaaatgggagtgactgtgggcttcagagccatgaaaacaagtcactagatccagggacacaaacatctccctcagcccctcactgtggtgggaaaacctcttgaaggcaagaaccactgaaagttacatacagagaggctggtcagagggataaaaaaaaatcccccttcgaatctgcagaaggttttcttaattttttttcccgagtagtctttctctacctggggttgtctgccctaactgacatcaaggccattttattgaaaattgttcagattgtcgatgaagcacttagtctgacatactttgtctattgttactgttaaattaagtttcactctgacagctgaccaccaagtcaggccccattttgtctaggagcttctttgattcaggaaaagtaccttatctagtaacctcattgttttgtagctcctttttacgcataccttttaacacacttcaagatgagagaaaagaggatcttttaaaatgtcatatatatggatgtgtgtgtacacatatatatatgtatatggatgtatgtatagatatacacatatatacatgcatatatatacatatatatacatatataaggatgtgtatacatatatatatatatatatttttttttttttttttttttttttttttgaggcagagtctcgctctgtcacccaggctggagtgcagtggtgcgatcttggctcactgcaagctccgcctcctgggttcacgccattctcatgcctcagcctcccaagtagctgggactacaggtgcccaccaccacgcctggctaatttttttgtatttttagtagagacggggtttctccatgttagccaggatggtctcaatctcctgacctcatgatctgcccgtctcggcctcccaaagtgctgggattgcaggcatgagccactgcgcccagccggatgtacgtatatatatttttaagcttagggagttgtgaagtcatgaaaatacagagctacagattaatatagctcttgagcatcatagctgctgtaaatatgtccctccctccatctctcctttcacaccccaggcatatatacctcatactgttctaggcagcaaggagcaaatagtgatgcttgccagagacaaaggaaaggagagaagaaatacatgagtaacaatatgttttctagtcatagccgaagaatcatggtatctcattgctggaagggatctttaaagttatgcatggtgtttccggccatttgtcctcttccaaggagagaacacaaattcccacagctggagttctcagcatccatagggatagtggtgcagcttgagtaggaatctggaaagtcatgcagagtgtgggtattctgtcgaaaaattcatcccttcctgtgattcttctcatctgccctccttgccccgtctcttgcccctcctcaaataactggtttaaatcaactttcttattttacagataagaaaactgaggtccatggaaaggtcaaaggacttataaagatcattagacactgggaaatatatttttccctttgttttattagggtatttcttgtctcagaaagaaaactgtgaaagaaatcaggctggtattgctgttgaggcagggactatataaagcaataggtatctttgttttcaaatgaaatttaattcatgttctaatcctattgtgaattagtgataaaatttagccatcttctatttgaaagggccttgctgctttaaattatccacctccttctctgatatcatgatggcatttcatcacctcctcttttttctctctcccttcttttctattttccttttttgccttgttggactagataacatatttgtaaagacacttaaaaagggattactctcaaaaatctgctacagaatcaaagcaatgcatttgtattttggacctaaataaaatgaaaagcctgtaaatagaatgcaaggtgaatttttataattatagaaccatatttcaaaagcactggagaagattgttatttgaaagaacgctgtaatgagtcttagggtaaagcaaataattagaatcatatttgtttggaaagtttatcatatccacaattcagtgatctggagaccttagctattcagaaatccaatttctaaggggagagtggatcaaagagcaaatctgaaagtggggccaggaaagcatatcttctaattccagaaataataacaaggcaggagaaacaaagcagaaagctcctttttttcttctttctttttttgctccctgaaccttgaaagacttctggaaaaactataggcttccaatttgttataagtttaaagagttgcaaagaatataatttctggcttattattgacatttaaaaattgttaaatattttttaagtatatccgtttggaatctaaatactataatgagttgagtctcactattgtcaatttaacaatataaaaacaaattctttattcattgaaaattgtgcaccattcctttctctataagtcatatttcattcatttgtctcacagaattttatcaatgtaatatgcttgaaatattttatgcatcatcatatagtctcagaacattaaattttttaaaaaaattttgaatttataatcctctacatttcaaaaattacatctggattgagcttttatcactattattagcacaagattgatcaaaacaaaaaatatgtatttcttatattttttatatattaacaattattaaatataaaagttaaaattattgaaacctcacctaataatgagattgtcagggctttttttgattttttaattcattcctatatcaagtcaaatattatttgtttcaaaacaaaacaggatttagcacaatcccaatttttcagttttctagatataagcattgagaaatctttctcacatacataagcagatgagattggaggtatttttatgtcattgaattttttaaaacttcttgccagttttatgccaaaaatcatatagtaatttctcatcaaatttttttttatgattcatcctctgacaactcaattagttctacttcaattttattgagagaaaaactgtcttgaaaaagaatttgttgctcagtcactcaagatattcaatttctctttttcctgggaagtacaccaaaggcttaccaaagcttctcaaatgcccattaattatacctattcctctttctcttagaggtgccatattgaatctgatagactcagaggtgggaaaactgaaatattccaaatttcagtatacctctgcaaatatgatttttaatttttggacaagattctcttgcttagtacattctttgagtagtgtatttcctccaagccttggaactgcagatttaactcattagctttatgaaaaatgtccactttatagtttattttgaaaaacttatttgctgaatcaatcagctaggtcaggcctactttctttcaacttgggttttcacattcaattaaacttccttgtggtccttcccatgcctgtcatttcacttctgagttctcagtctgaaatagattggctgatatggtgaggaggtttgcagtgagtctgctcctgagagaaataagacaccatcgccattgtattttttacagattcccattttgctttgctctcatgggacttttttctcaggagcaatgtattctttgacaattgtttgcagatgaaaaggcgagatctttaaacagaaattgtcatccccatgatacccttactgcagatacattttcagacatatcaattttaggaaaaaagttgaggatcttgaaatgtattcttttaagaatatctgattccatgaactccagttggaagactttatacagttatagactgtataaagcagaagaatgaaggtacgtaacagcctaagttagggccatttagtgtgttgatgattagtgttaatccccttcatatatgttctgaggatttcaataactgatattcatattggtgatctggattcatcaagaatttatgagggctggtttcttcctaaaacagcattttggatcaatttttatgtgagagcaagctaaaaatgaaaggtaaattatttgatactgaaagtggtaaatctttggaatctatgtcttttgcacctacgtttctacaatgaaatttgtaacttgtcataaataggaatctattcaggttcaacattgtggaattccacaaccacagttataaaggatttggaaaattctctaagctacacaagaaaacttttataatctaaaattaagaatgaataagtaagtcagtgcatataatttctctggtttttcagtagcccattacttcaagatttccaccttgtggaaagaaaggaaacattcgaagtttaccttaagtgaagagaaatttctcatgttagagaatgtgaattaaaattattttccaagaatttatcttttacctataattataacaacaatatatcattatgccattactcctacatatactgagagttcaatggaattatttaggttatattttttctgactcttactttctataaaacatggaacagtcaactcttgatattatctacttctccttccacaattctgctacaatgagaaatatttaggtaaaccttagaaccaattaacttattttgtgtgcagtttagctggtgatataagaaatatcagaagggactttaaatacatttcttaaaatattggcagtgtcaatgctgacaggactgaaagaaagcttgtagtctaaggacaaatgtgcaggcatttgcacagtatcttccttggccatcaggtggaacagaatatcaagcctgatccctgttggttgtttagtccagatttaccaagcagcagataaacccagatgctgtgtggctgtgcatgttacttaacctttctaaacattagttttgtcatctgtaaaatgacaatggtaatagtacttattacatgggattgttgagtcacataaatgaatgaatgcatgtaaagcattttgtaagagcttaatattgttagccattatgattatcagtaggtctgcaataataccctaagtggaaaatatggactaatgggctaatattggatcagttgagttaaatgtatttacagtttgatacaagtataagatcaccccagatccaataaattcaatcagttgtttaccatttactttttttttttttggtaatcaagtgtaggaatgctttgtcatcaagtatatttatagcatagacatttttggtaataattgaagatatgcgcagagataccatgcttcaggtgatgtgattattcttagaacattgaggcttgttgttatttaccatctctttctagtttcaaggtgccacttaggtagatgaaacttctggctgtatgaaagattgttaatgtaaatcttctgcactagtgactattagggtaggtctaaaatatcaccttgtcatagaattctctccaaaatagaaaagaaaccttcaagctcttttcgttatttcctaaagggtatttgtaaccacagtaactatgaaaggctacccaaatattatatttcccatttttgtcaaagattaggttaccttcatgttgtaatttcattatttatttattagaagttccatcagacaggatatgtatttttcttaataataccaaaaaggaaatgaattaatcgttaatcttggatagatgaaatattttcaaacatgtactccattctcaaatcataataaaaggagtccttggtagtgagattgttaggaagcacttctttgagtaggttgatttgggagcagtggggcaggagtaggcattattattatgtagtatctatataataactctagtatatgaatttgatctgtattataggaatatgattttacagcaaccagttaaaaaacaatttcattgactttcactaaggcatcagtttaataaccatttggccaattggtcaaatttgaagactcctatttcttaagatcaaatttcatatatggtagtggaggaaagcactttaccgtttcagagaagaaaacacaaaaacaggaactaaggacgaattagggaacccaaaagaaagagaaccagaacatatatcacgtggccttctgacgctaagtgaagctcatgcctgcacccctgctgctcttcctgttccttgtcagtgtcagccgttgttttgaaagagacacaatgggacccagtctattgcttcttaagctggggcagagtttatgttttgtctgaatggctgcctccttattcttcagagggcccaataaaatatgttaaatactactggtgagtaaaattgctgagggaagaaacacaattattgggcaatgtttcttgggagtttcaggataataaagcagagtttggaaataagactgtgtgaactatcgagtagctgtatcagtttgtggaattaatttactgaggcggttagctgccagttttccgcacagacacacacacaaaaagcccaaattagttccattattttttaacatgtgctaagtgcccatagcatgttggtgccttcacatgatatcagaatgcactatggagggaactgaacttgttattggatttaattaatctctcaagttaattgccaatgtgggccacatttcttatgtgagtaaaattggagtgtgagaaaagataatgtccctccctcattaagctgtccacgttagatttacagggtgacagtcaggcccactcaggcttagttttgatagctttcattactgacatcacagagtaagtggtgatctgtcctttcattattagactcaacccaataactgttgcacaaacacaaccacctctatcagggaggcttcaaagagctgtttgtagtttaatgcttcgcttgtcatttttttttttcttcctagccccagactccttttgttctcccaatgcagggagaattgtagtgcagagccctgcctgacacctgccaagaagggcagcccttgccaactgcagccttccctggagcaggaatcagttagtgacttctgcaaatgatgtgactttgtagatcttaggaacttcttttcacacaattacataacaggcatgtgattcccctccatccccaacttgtgcttataaaacactgtggacagtaccttttaaaatggctgagatattgattacctgcaaaaactggaaaaccatttgtatgcctgtctgttctgtaatgtttgcttctacagggtctttggttgaattccctagaactggagatgggtgtgcaggtgattagtaagagagggctcttgggagaaaccaggaagggagtgagggaattagtataaggaagtggaagaagctaccaaggttgtggtttcaggtgaaattaacctgatcacatggggagtcttgggagcatgaaacatactacagggtcagttctgccttgagacaggagtgtagacttttgtaccttcccttcccaccattcagtctttagctatggaccctgggtgggggccgaatttagtgatatatctccccagaacctctgggtgttgctctggtcactcaagggcaattctttggagaagatgggcagcaacacctgtagggaggaatgggacaccaaactggtaaaagggatcctacagagatctgagtggaacatcaacagcttctgaagtgtagggaacacattctgtagtcgcatagggcatttgcatgcataagggaacccacgtttccttcaagttacacaattttgtgtcagagtgagaaagcattgtaactattgactcctgattttgtgttgtgactccatctttggtaggagattaagaactggtagacagatgaaaatcatatattatattttttaggtttatggaagatgaagttagtagttctcaaataggtattcacctgagaaaaagaatatgaaacttcttacctccactgaacctaatgaatttattgctcctccatcgatttctagtaaactgttgttaatgcctgtaaaggtaattaaacatggcagatgaaaaaacgattacactctcaggccaaagagggagtaagttatgcagagtgtctgggggctacaaaatacagcctcttgttccatcgaatgacagggtctaactttgtgatgtaaacacattattgcaaatgtcagtgcacagagaattgtttagacagactgcaaagatgattactaaagaagaagcaaagcaataaaatacaaaacaacaacatttcattggcccagttataattccaactttttatctgtttggatgaacaatttcatatagagacttttctatgataagcttttaaaaaataagacagcaagatgaaagaggcaacaattaatattaaaatgttatgcacattaatgtaaatgataaaacattttatatctcaaactgcaaagaatatattctgtggttaatttttctttcactatttcccctccttctttccaatcgaaagtatcaacagcttaatattatagatcaaattattaaactttctactatgtaagtttttgaacttagccatgtatatatttgtatctagataatttccgaagaatggagtaaagatgctttattcattctgtatattttatttcaaaaatactttttcagcagtaattcagcaaacttaagggtttgtaaaggtttttctataaagagaaaatgtgttatgtatattttatttaaaagtgtgatgcagttctccaaatgcagttaattgtaaaaaaaaaaaaaaatgttttccaaatcagtgggggacttttttggtgccttcttttgatttttcatacttttttttcagaaaggaaattttatacataaaagttggtaatgtctcattacataaatctcaagtgccaagtgtcatccctaaaatatttctcaccttggattcgtgaaatatttttaatttcatggataattttgctttttagcatttgttatggtcattgatgttgctgtttttatgacagaataatttttaataacgtttttgttcagctgcgttcaaatgataaaaggaagaaatttccttaaaaaatactgcttgaggttaccttctgagtcttcttttggcatcttaatgtcaaatcccatatttgagagcactaatccatattaaaagaaggttcaaaattgaaattataccattaaccttggcctttttcaagtgaaactgttttacaagttctctttgccatcagcatgtttaccaagctctttattttcaaatgtgacttcaggcaattttttttttttaaaaaccttgttttaagcatggtggtaactgctcttcctgctccctacttaccacccaagagctgttttccactgctgccttcccttgcctgctcttccttctttcaccctcagattctaaactgtgtagatgagtggagtgggtgaggacacagctagtaaggagaggggccatttccacttctgggtcctttcctcaaaagaagacttgctgagagcccagccatgttggaactaacctccccgacagtaagtggctatcttgacctagtgttcgctgtgctccaggctgttccaagtgttctaaatgcattcctttcattcttcacatcagctctaggcaccacatatataattattgcgtttcacacacagggaaaccgaaattcatagtggcccagccatgcaccacacagcctgctctgaaaaagcttcttcttggattgagggaccaggattaacaaatatttatcagttccactacttcaactatatactgaaaccttatttaaggaattcttcgtgtctgttgcagaagttctttgctcctaggttaaagtagggtggttcttatcatcactattaccaccatcatttgtcaccgctgccataattatcattgtcaccatcaccatcaccatcaccagtaccatcaccatcaccatcacaatcattatcatcctgctcctcctcatcatcatatatagcagttactgactatctcttctgtggcaagccctaagttagatgcttagcttttagcaagtttttctctaattcccctcaacgtgataaaaataaaattatctaatatggacaggtagcccatctacataaaataatggagaagtcattagcttaggaatttgacagatctgagatcctaattataagcaataattataggcaacatatctgagcttcatttactcacctttcctaagagcttaataattcctatcacattctttctagggagaatgaaataagatgggatatatagcaaatgcttagcactctgctgcaatcatactagccacccaggaaacattggttcttctccctctctgctgtacctctcatgtggggagaaaatggtgggaggcatagataattgctatattgaattgtataatgaaaaatatcccatattatatatttaacaacttacatttctcatttacttactatgtttgaggtatgtttgagtgcataatgtgctttacatcatttaattttcacagcagttctctgcggttggcggctgattgattttcttaataccaggaatcagggatgctatccttttccacctgctgacctgtatgcttcatcagtgggtttttttgccttctggccaatggggggacccaagcaggagactggaaaatggaaggagagtgaggtcaaggtattagttgccttggatcactccctgtggggtccctttgagctggctatgttcctctatcaaagcagatagctcttctcgaggttgacctctccaccagactttctctttccaagttctggtcagtgctccttccccttctccctttatgtcgtgtgatgataacagttccagagtgttgaatgtcccttatggttttcctacatactacccaaagttttataaatagtccctttattaaaccttcctcaaattattctaatttcagtgggccatctgtgtcctgctcaattcctaccaatacagaagaggagaaaccgggcaacttttttgaaactgcatatgtacactgggcaaacactttatttggggtggcttgggtggatactggtagagttgattggggagctaaagacactcaggccatttttgccattaacattagcaggatctatttttatcagtctcaacagatattcagaacttttgtttcaccatggacataatctgtgctcaccttctttcacttgcacaatattcatgtggctccgatactagattttgcactcctttagggtagggattcttctattcatctcggtgccctcaacacaagtacaccactgtgcttagtagacactcagtacagtcattatttaataatctgtctgcccacccccaagcataaggatgatctgaagtaagtacacaagtacactcacagagcatgttttgcttcttgaggttagcttccataaaaaaccaaactgatgtattgctgatgtgttatatctgtaaatattacagaaatggacatgccagatttctcttctttagcatctgctataagagaaaaactaggcagatgcctggaaggcatgggcaattgcaacttttcagtaagatatactgatctggttttaatttgaaataataaagaacattttttcttctctttggacttttttacctattaaaattggttccaaaatgttctcaagtactggatattgatatttcttacattgaaagcttgattgcagataccctggtaatcgtgttttaccttttaattaatgataagcactggagaactcagtactagagcagtcatagcttcagcttttaaggggcataaacacaatgtggtagctaaatggacattataaatgaatattagaatcatcagaattctttaaatgaaagctttcatcactaatgtttcagtacatttaaataaaagtaggataaaagcttggtagtgcttggtcaattcagtggctgtgttttaaagtctaatttgtaaaagaataagaattcagttatcttttaaattaggataaatttcttaatattacaaaggaataacagtgtggcgtgcccctttagatagatggcttttcttttgcagattgcaaatggctatcagtgtgctgaatttacaggcaaatggtatgggtctcaatggagagacactttctgtagactgacatagattcctcttgggagaatttatagacaataaattatttatataaaaacctaagattcttctcctgtgctttagttttaattttatatcactgcaaaatgccacaagtaatcagaatagtctgtgtttgataggcacgaactacaacaaaaaccctttcagcagcattcttaattgcaccagaccttgagaaagggattacaacagaggtgggccagggtcaagaaagtgttgaagtgcaacccaggaactgccatagagtttgctaagccattgaagggattccaggcaagcaactatcagaaggggtatggagcaggaaattgggccgggagtaggagaggttaatggaggtgtgggcatctgagatgggtttgcaatccactttccagtgatagatgcagatgctggcacattgcaaaggaagaaatacctagaattttattacgatttcttaccctgagcaatcaacgggcctaattaaaaaaaaaagaaacaaactttaatttttgtcatagaagtagtgagtggaatggtggtcactagaggctgggggatagggagagggaatggggagatgttgatcaaagggtataaagtggccaggtgcagtggctaatgcctgtggctcatgcctgtggctcacagcactttgggaggccgaggtgggaggatcacttgagcccaggagtttgaaaccagctagggcaacatagtgagaacctgtctctacaaaaagtaaaagactggcctggcatgttggcacatgcgtgtagtcccagctactcgggaggctgaggtgggagaactgcttgaacccaggagattgggctgcagtaaactgtgcttgggccactgcactccagcttgtgtgacagagcaagaccttgtctcaaaaataaaagcaaaaaccagggtacaaatttgcagttagtcaggaggaataagtttttgagatctattgcacagcattgtgactatagtaaataaaaatgtatcacatattttaaaattgctgagtataaatttcaagtgtctcaccacaaataaattatgagatgatagatatgttaattaccttgatttaatcattctacattgtatgcatatatcaaaacatcacattgcaccccctaaatatatacaagtattatttgtcaattaaagtaaattttaaaatttgaaataacagtagatacacagaaacaaacaaagaaatgtagagggagggcctgtgtaccctttttccagttttccccaatgttaatatcttgcctaactagaggacaatataaaaaccaagaaattggcattagtacaatgcatatccatagagcttatttagattgaccagttatgcaggtactcatttgtgtgtgtatatgtgtgcatgtgtagctctacgcaattttatcataagtgtagcttcatgaaaccacaaccactatcaagatacttcactgtcccatcatcagagactccctcatgctacccctgtagagtcaacacctattccctaccccattctgaacaactagccaccactactctattcttgatctctatgattatcatatttcatgaatgctatattaaagtaatcatatagtatgtatcttcttgagattggctttaatttttacttagcataatttccttgatattcatccaggtgtgtatcaatagttcattcctttgtattgctaagaaatattccgtgttatgttatatcacagtttgtttgaccattatccattgaaggatatttggataattttcatttcttgggtattacaaataaagctgctacgaacattcatgtttaaatttctgtgtgaatatgagttttcgtttctctgtgacaagtgcccgagagtgccacttctgggtaatatagcaaatttattttttgttttaaaatgaacagctgaactattttctagaatagctgtaccattttacattcccatcagcaatgtctgagtgatctagtgtctctgcatcctcaccagcatttgatgttatcactgcttttttattttagccattctgatagatatgtaacaatatttttgtggttttaaattgcatttctcttatggctaatgatgtcgaatatttttttgtgtgcttactacctgtatatgctctttggtgagctgtctcttcatattttctgcccattttctaactgtttattgttttttttttctgttgagctttgagaattatttatatactgtagatagtaattatttgtcagatatatggttgggatggcctagggcctcactgcccatcgctgccctagtggtagagtaggggctggggctggggcttccccactaggtctctactggacttctttactggtcatttgaccagagggagcaggctctccctgttgctgttttggggttgcagccgtctctggaacccggcatagggtatattggaaataaaaaggaaaccccacggaactcaccaggttgttgtccctcaagtgctaaggcccctagtcagtttctatctccttttttttccaggttttagagttctttatcacttcccgttgaataacttccagggtatttagagggaaggagtagagaaaaatgagttcactctaccttttttcagaacaagccagcagatctgatacctaagaagccatttggtatcaaagagcagcaggactgattttcctggagatgttatctgatggacagtaagagcattatatgctttgaccttttaatgtcttaccattgtgtctcaaatagcccttgtattatgatggttgtctaagattaaaagcttaaaggtgactgtccttacagccagagcttaaaaatattttatctagcctggaacagaagtgtcgcatggactctgtaatgcactgctcaggtcctcctttaggagctaagggcttatcaccctacttgctgtggtgctgcccatagacaaccctctcccaaaggcatacctccttcatgaggtggcctgcttccagtgactgatcactggagggtaaaaaggcccctcccttctcaccctcactcaggacattccatgctatggtctcaatgtttgtgtacccccaacatttctatgttgaaatcctaaccctcaaagtggggcctttgggaggtgattaagttgtgatggttccaccctcatggatgggattagtgcctatacaaaagaggccccagggagcttgctagtccctccactgtgtgaggacagacagaagccatcatctgtgaaccagaagtgggccctcaccagacatcaaatctgatggtaccttgatgggcttcccagtctccagaactatcataaataaatttctgttgtttatgatattttttacaactgccagaatgcgctaaggcaccccatcttcattattccccacaagctaccattgggacttctccttcagctcacctgcttcctcctctatttccctttccttctgcaggtgttgatccctaaagaattccttttaaacctttcttcaagctaaatgcatgaggaatctgtttcccaggaccttaacctacctcaaaagtgctttgcagatattctatctttttctacatggaattgttcattgtaaggagatcatatacttcctattccagaataataatgtctttttaaaaaatgttatgatgaccatactagatagtaatcctatttgctttcaaaatcttcactttggagaataaaaagctgggatgttatgcatttctctccagtgtttgaaatctataagctaagaactgtagcttggaatcctgttagatttcttgcaactgtttgtttttatgaagagccatcaccaaacacagctggttttgtagattattgtttcagaaagtttactcaaatctgcagtgatatcttctgcagttgctgttaatatttagaccctgcatgctaagtgtattgtattctattgtattgtatccctagcattgtattctccatgtggctctctagtctgagtttatttgtttaatcaggaggttcagaacaaaaacatggctgtggcagtgtccttactcatctataagctttttgcttggctgccagctgattgcaatgtataaacagtagtttgcatgttactcagtcatatacatgtcctgccaagagctggttactctttcacgtatctccttatttatttcccacggtgtctctaaattactatgtggagatctcctgtgcacttaaagtcactcatctgccctctgcttgttcatttagacttcgctacctgaattatggtgaaccatgaaaaaacttaaataagtctaccttctctttttaaaaaaagttactatgaaggtgttatatatttgactgtatgcagtaaatgtgtacctaaagacaccaataaattgaatgtctgtaagcctaataaaatgtaaatgcattaaaagagcttactattcctatggagagtttgttcttaaaggtaaatgataaacctttaattcatgtttaaatcaagcttttaactctattaggttctttgtggaaaaaatgtatgtgacaatgagccagatgaattctcatatttctttctgaatggcactatggttcaaattagctcaattaggggtagggaggggattaataaaagtagactttaataaaattaaggacatttgtttctcatagaagttacttgctgatgacaatctctaagaaaataatgtaatgttgacaaacatttaatgagaaagtgcgtcctcaaaagctttaaccctactagtttattagaagtccaaatgagtacctattacaaatatttacttaaaatatttcctttatattacaacatgtaataccctttaaaaaatgttgctcttgaataacaagcaaacaaacgaaagctcaaagaagctgctactctctatccagagtatatccttggaaagtgatggctcatcttactggttattgtttcatcatgtgatgtcagttgttaatagtgtcttcataggtgttaaaattatgggaactatcttgaaagttgactttttaaaaatgtcagcatttggtgttggggcaaatcccttggtccttttcagcctgagtttcttcatcatcaaaatggctaaagtgatatttatctcagaggtcacatgagatttaattcagttgagagtgctttgtgatctttataggtataatcagatattaggctgtatttctgattttctagatatttcttctgaaaacaaaattacaataatattattccttggcctaatgctttccaggtttggaaacccctnnnnnnnnnnnnnnnnnnnncaattgcagtgccagagaaggcgtgttttgttttgttttgtctttaatcttttttaagagaaaactgaggctccaaggcattatgcaattcacgaattcatgctaggtcatatatttaataagcagcagaccaagggctagtatcaggctttctgactgctagttacttcttgcaggtcagtaatgtaaatactgtaatacgaggacaaagcaggtaatggatatgagtgagtatgaaactatagggagtggtgggaacactggcaaactagagccagttttgatccagagatgactaggaaaagtgcaccatccacacccccctcaacactcccaccccacagcttcagccagatgttgccaagtagtctttctggtccagtatgctaagatcttctgattttttttttaagagaagtcagaaatttagatctttatgtaaaatattgacacctactaaaaagaagaaaagaaagagacagacagacaaacacaaaccaggtagtaccagcactttacctttctctgttgcagcctgtggctgtgaggtgcaccttctccctggttttggatccattagatgctgtatgaaggagagggtaaggcacccaagggcagggattctgccacatgtattgtttcatccccaaagtctagccaggtgcctaaaattaggaaatgcactaggaaatgcctttcaataaagaataaagaacagcaacaacagaccaaagagttcccagagaaaccttggaaacctgagtcagcacacaggcctgcaatgtggagttagttttactcaataatgctgagaagcccattagaaatattcagggagttaataatttctcttattgtttttcaaatggaaatttaggagtggcaaaatgagggtgaaattttaattcatttcttgaattactaaacactattgatcacactaaatacggcatatgccaaacatatttttattaagttttcttcaatgatttctgtctgaatgctcataactttcaggcatagtggtgtgtgaaaatgataactttattcaaagcattctcacttcaaatgcacccatacttaagcaggaattcatttatcttaaaatgtttcagaggatctctttattataaaggaaaaaaatcgccatatgaccctttggttaatgttgattatatgtatgtgagtatgtggtcgtggattcaaacacgtaattctaaaatgtttagaaatgctgcatctactgtattatggacattatgatttttcatgaccaaagcttgttacattattttcctttaaacaatcaaatagaagcaatagtatttaggttgagtcctcacagcaacaacaaaatgccacaattaagaacaaaatcataagggtggatgataggaacctgtatcctatctgtggttggtttgacaagatagagttatagattaatgtaatattttattccacctttagaacatttcatcatcccattttaattaagattaagagttagaggagcacatatctagaaccgtgtcttgcaccgcattttgcatccgggctttggataacctgttgaaagcaaaacaaaacaatctacctcccaccatctcgtcacactctgacttcaagttcagcttcacagttaaataacttgccaacttcgaattagcaataaacagcaactcaagacctgtagggcttataagcaagtgagaagtggtgcttggaatgattacattcctaagcccacaattatcacagttcagaactaatttttatgccttaaataaaaccaaaagaatctacacaaagcacttcattttctgggaaggttaaattaaaattaaagtgttcactggaaagtcatcctctttaaaatgcatttgctaagaaccacttgaggaaagagtagctactgtaattttaatttttcaggtgtaaatccttttactccttacaatagatacagagaggccactagtatttatttttttagtgtgatattttaaaaatcctttttccagacagttcttccaggcttacagattgtatacatttacacaatatgataatttattaaccaaaatgggtagtagctgagagtgcctgaaatggaaacagacaatattccagagagacctaaagcgggcaatggataatagccggagtagcaccttggtttatgtcacgtgtctcctgtaaaaagtccttgtgcttttgcagctctctttgaaacattctgcataacatccaggtcacggtctggggagagggaaagaccgctgggacacctgtagtcgcagcaactgtgttcctacagcatgaagagctgggaggaggaagaggtaaatctccctcttcatctttggcagctcaactgtttgggggcttgtgggaatttcatctgagatccccgttaactttcatatggtagaaatctaacaagttaccttgttgacctttgaggcagcagcagagttattaaactattattattattattattattttgagacagagtctcgctctgtcccccaggctggagtgcagtggcacgatctcggctcactgcaagctccgcctcccgggttcacgccattctcatgcctcagcctcccgagtagctgggactcaggcgcctgccaccacgcccggctaattttttctatttcttagtggagacagggtttcaccgtgttagccaggatggtctcgatctcctgacctcgtgatccgcccgcctcggcctcccaaagtgctgggattacaggcgtgagccaccgcgcctggctggtattaaactattttcccgtgggttctctctggaataatgagtgctttttaaattaaactaaattttttaaaatttctaaacatttaaaaagctggatttctagattctcttagaaaattggaaaacctggcaacactgtaccattattattccttcatgggaacgactggctggagctcagctgcagctgtgatgtttccatgaagtgtgagctgcttatgtgacaccagctcccttcctggttttagtgttttctcacctgtgcggcttgcttgctaggacacttgcatctatccatctttttattggtctccaggctcagattcccattgcccaatggacattttggtctcaatgtcccttccgctccaggttcaacatctccggtgccaagatctttattcccaaccgtgcccaatgttgctttaagtacttgatcggcatgatcttatttaattctctaaaaggtgagtatgcttatcttccattttacaaatggagaaactgaggttagaggcagaattctaatctgaaatggtttgatttcaaagtccattttcagtctcatttctgtctcaggagggtgaaggactgtgcatgtttttcttccttctttccattctttttgtaatgtgcttaggaaaattgaagtataactaaatatgtaatacacttggtgacttgattgcttcctcttcccccacgttctccatcctttaagacatgcgtaactgttaggcttgtaattacccatttccacaaggagagaatcttagctttcatagcaattcagaatatctagatcattgtcatccaaatgaaatacatgtgagccacatacataacttaaaaaaatgtttaataaccacattaaaaaagttcaatggaagaagtaacataaatttaaatagtatattttatttaacccaatatctttaaaatattatcatttcggcatgtacagcatgtaattaatatttgaacattattaaagaatcatattttatattcttcttttggtagtaaatctctgaaatcctgtgtgtattttatactcacagcacatctcatttcagactactcacatttcaggtgctcaataggcacgtggctcatggctactgtcactggcagcccaggtgtatatcattagccgtacatacaaagggagagtaagatagagggatcaggttcctgttatagccaaggcataactcagaatttctaggccctcgttcagacctcctcctacaaaccaatgttatgagccttgagatgtgcaaaaaagagttttggaatgaattatttattccttttttttatggatgcagctgcctgatgtttggtaagccaaagaattggtataattttagtatatctttcctgcttttagtgcagttctagagttttaatggagagagttaggatatgatttcataggaatatgttttatctccctgggtggtgtgtattgccttgcaagcctgaggtgagatcataagtctaaatcagttcccttctagaagttactttttgcctaccatcagggacagtcagtaaacacacagaaagaaggagggtataacattgttgggtatagcagaacttcactgaagaagcaactgaagaacaatgcagtaaagtgtgcaataaaggtgctcaagccgtttcaggcagtgccaagacggacagtctgaatccggaatgaaagcttgttcgatgcgctagtaactgtgatttgtaatacccagagacgaagactaaaggcaatcaattatgtatggcctgttattactttgtgaaaactggtcctgaattgttttattatttgatagtgtttttccaggaaaataaggtttcctttgctaacatttttcactgagatagatgcagaaaaactctgaaccattctagtgagcatgtatttctagctagttcaccaatttgaatttcaggttgtgatgatatggccataaaaatctgccctgggcacattttcggctgatcttagcttaaaagcattttttaatgccacgcgatgggacttaatgactttgcattgtgggttgggtcactctatcaggaaaatgaatccattcggatcctgttcttatgctggaagccctctgaatttcctttattgaaatgccagaaagtactttctaaatacatgttccatacttcagttgttccacggcctcctgttattatttttattctttatagagcacacaggtacttgagctatatttctaaaacaaaaaagaagtgatcctgccccctcgaactttcatttaatgcagacaaattcagcacaattgaaaggtaaggcattaagcaggcactggcaatcaccagagagggttttgggaagttggtcatggtcccagtttaacacacttccccattgtcctgctgctaagccgagctttttcatcacctgccctgcggttctttgccattgctgtggctgacattatgtgcagagctgtttaacttagaaacgggaagtagctttggaaattaactggctcctaagtagtcctgaggtcatcgttttcctgaagagagcagtcaccatttgtttatttatgtagctgactttctgatcccctgaaatacatatttttttaaattaaggtataacacatacatcagtaaaagtttataaagtatgctaatttaagtatatggtttgatgatatttttacatatgtatatccatcatgtaactgccatctagatcaagttatagagcacttttcagcaccctggcaggctcccttgtgctctttccaaatgttttccaaatacggtcccttataatgttaccactgctttgatatctaccaacagcagttagtttcacctgttcttgaacttcatctaaatggaattacacagcatgtagtctctcctgtctagctttcctcaatcaacatatttgtgagttgcatccatgatatcaagattcatgttcctgttggtgagcatctgaattatttccagtttttccagaattctgttttggtctagattctacctaatgtcttcaggacattaaagaggtgacatttgtccaagggcctggagcacagagatgctctatgctgatggaaacctccatcctgtctcccataagtctgtattctcacctgaatgatcagagtagttgctgagtgctttaccttctgcttctctttcttcttcctaattttaataataataataataataacaacagctattattatatgtatcaagtactaggcactaacactactctgtattatgtgttatatctcatttaattttcaccaagactctgggaagagttattattatagttttcacgtgaagactttagtaagtttgatggagtccctaagatcacatggcatattgatggcagagcaaggattcaaacctaggttttctgactagcactatgttcttaatcactacccgtactgacaaagacagggccttgggatctgtaagggaaatgctatctttgagtggaacacaattttgtccattttcttcccccatgacgcccagacagctgtaatttttaaaatatcaaatagaatctatcatttccgagatttgaaccttcggtggctgtccttgtcattaatataaaatactaagtcttcattaggcctgcaaggccccacctgatctgctcctgcccccactccctgacctcatcccgcatccactgggccctcctcaatgccctcgggtcattgaacttcatctgttcttgaacaagcccggcttgtccccggcactgggcctttgcatttgccattccttctgccaggaatgctcctctccagatctttttatggctgattccttcttgtaattcaacttgttgcttaaatgtcaccttcctagagagtccctctctgaccgcccctccacccccgtccccattaggaaggacctgtctctctatcacgttgacttactttatttttttcccaacacttactactaccaaacttattttgttcatttggaatattaataattgtctgttttccctcattgtcatattcactctagaaaagtacctggcgcttagtaggtactcaaacgggtattgcctgaataaacaaaggaatggaaaaatgtatgttttcaaaggtctgtgtaactctataagacatttccttatatattttataaaggaagaaagttttattttaaaaatgtgactttacatgctgtgggaggtccaaatttcatataataaaatgaaggcaggaggggagctgggcacattattaattttatgtgtggaagatgctcgcaatcgcgggaattgacttctggcaatgaagcaatttcccaaatgtcagaactaatcatatgatcctggaaagtggttctcttcttgttgtcattgtttattgtttgtttattgcttattataaaaatactagaatggggacactgtttcctgtccagccctggagcatagcatgtgacacaaatcataacaattaacacatatttttatattggagtttaaaaataagaaatgtcacaaggaaagcatatatagatgctcttttatcatcgccaccccattctaacatgacaagcccaggaatcattaacgatcctttgttctgctcaatgcgtggggttgacatggatatctttagtaacgagctgctccttatcttatcataaataacaagctgccactttggcatttggaggctgcagaccaatttctgtaatatcgcattcgccactctcttagctgctgttggatttggtaggaagtttttaatttaaatatctttggtcctcggatgtagatttaaatttcctggtccccaggcaaactttgtcaaagggacttgcaacccattgctcttagaatcttgcatgccaggcacccttgggcgtacataagggttgtgggtgtgatgggcggggctgggactgttgtaccctgtggagcaaagaaaagcagtgttaggagaaatctaacagtgcagttgaggctaggagtggtaaaggattgtgtttctttgctagcctaggcagaatttcttattaccccacatcaaattgcgtcccttgcctctgattcaagcctgcacattcatctcttccttccacctcaggcttttattgatgcttccacctccaggcagtgcacagatgcaaacttctgtttaccgtctctgagtaatgatattacttccactgcccagggataatgcattgcttattaaacactgtagcaataaccattagatggtaaatcaaagggaaacataaaagagtcaaaagcaccgctaacccctttagcaaaaaatgatcagaatttaacagaagtagagttttcctggttaacagtggggagggattaacagcctcactgctgacttgctgtgtgaacttcaaagatttactaacctttctaacttcagttgacaacgttgataagcagaataataattgtgcctacctcctagagttgttgtgaaggttaaatgaaagatatacattgaatcctaagcaaagtgtcttatatgtagcaagagcttaattaaagtttccgtaatatgatatcttaaaagactttcagaggctgaggtgggaggatcacttgaggccaggagttcaggaccagactgagcaacaaagcaagacccctgtctctccaaaaaaaaaagaaaaaaaatttagccaagtgtggtggtacacacctgtggtctcagatacttgagaggctgcgacaggagaatcacttgatccaaggaggctgaggctgcagtgaaccgtgatcactcctatggcacttcagcaagactctgcctaaaaaataaatacataaataaataatgtcttagaagaactgtgttgtcatcttcatgggggtatgctgtccatgaacttagcaacaaacctaggaaagataccttaaaatacaaatgcttccttccaacactataggtgtatccataaaccaaagacttcagtagaaaaacctgtcctgtctctactcagttaccaaattatcttggtttttttttttttttttttttttttttaacaaagccatggccatttgaaaaaaaaaaaaaaaaagccttttaacaagtatcgtttagaatcatggttatattctacacagtgcattgaatttaaggttctcaaggctgtcttccatatactcagttctataaagagcagcctcctctctagaaagttgtttaaaactaggagacttgagatgcaaaatgctgagagattcagctcaaacaaatatatcacctcttgccctttaccttgtcaaggctgaacagtcttgaacaggcctccaggttcccagcccatgccctgctactctccttttatgtatcatgccgatcaaatgctggaagattctttccccttctgtgctgctcgtcagctctcatttgcccttaaaatctcagctggaatatggtctcctctggacagcctcttgtttcctcagatatgctccatatttggttctatgttcacattgctcttggaaatccttcattttattctgtcctgtgattatgtagtaattattcataattattaaatatccatcgtgtccactagattgatggctccatcacgtagggattcttttgttcatcacagtattgcacagcccttggcacatggtaggtaccctatcacacaaatggggcaagtgctaaaacttattctttataagaatttattttcatgtggcatataactaaatggttaaaatattacattacattttttctcttatgttgtagcaattgtcatctgctatatttagtttgcctttgtaccattgaaatgatcatgtgctggttttgtaggttaagatttaatagcatctcaaccaacaaacatctgatttttaaagcagtaactgtttaatatactggtttgatagtacaaggtgacattccctctctctctaagaagccttcagtcttcaaagcacatcatacaatttcataaattaatcctgggaataagcgtcatagtaaagatattgattttagaatccggatggaaaagaaggcagagcctaatgtttgaattctaagttgcaatcagatatagtaaatcaccaagaacaaaggacagatacctcaacacctagaatcaggaagatggaagagaattttatggactcaatttcaatctcccttgtctcttcaaagaatcatacctcctagaaagcctttggtccttgtctgattgtttctaagctaaactggggacttactgatttggctctataaaatgattttagcttgccaagaccagcttggtcagggagaccctaacccagcagtgctagaggaattaaagacacacacacagaaatatagaggtgtgaagtgggaaatcaggggtctcacagccttcagagctgagagccccaaacagagatttatccacatatttattaacagcaaaccagtcattagcattgtttctatagatactaaattaactaaaagtatctcttatgggccgaattaaaggaataggttgggctagttaactgcagcaggagtatgtccttaaggcacagattgctcatgctattgttcatggcttaagaatgcctttaagtgattttccaccctgggcgggccaggtgttccttgccctcattccctaaacccacaaccttccagcttgggtgttagggccattatgaacatgttacagtgctgcagagattttgtttatggccagttttggggccagtttatggccagattttggggggcctgctcccaacattagctttatgctcttgcttaggattttgcactagctctgagatgcctattatatcatgttttaagttctgcctgcttttcaaggcaatttgatgttagaccccacttcaacttgactgacttaattccaactgctcacatatggtctcatctctctaacattttactgcaaatgtaatatgaggtacaagtgacatagtttcatcctggcaacaagatgatgaataagacccatcccttccctcaaggagcttatggtctactgaatgaaccaagcaatgtagacttataaagtgtatgtatgctacatgtaaagcactatgggagatattttttaaatggacaagacaagaatggtaagaattaatgagtaagtgcccacagagaactcagaacgttgccaagcacatatcagtgggggaataactgtcagcggctattcctatgatgctggtgaaatttctggcttgagttcttgagtgtgtggtgaagctatctctgacatccagagcccatgaggtagaactcaggataggctggccagctacacaaatttggtttgagaaaaatgagaaataactggggggcatcaaaatggcgatagttgtcagcaatagagaaatttgaaatttgggagcataattaggtagaaagatttactgttggcagtaaggaatccagataatcctattaaccaatacctctccactttggggttttatcttcacagttttcttttctatcagcatttcagactgtttacctattcctccagtttaactgaaagatgtatttaccagtattcagaaaggagaatgtacatagaattaaagcaatttttaaaaaggccaagatctattccagcctctgcaacctcttaatctagtgggaggcagacagactaaagaataaaatactaggctggctttgatagtgatagtaattcattggttttcaaagtgtggaccctggactatcaggatcagcatcacttggtgtggtagactgaataatgacccctcaaagttgtccacatcctaatcctcaggtgaaaggactcaggcctaagttacctcttatggcaaaagggacttcacagatatgatcaagttaagggggttgagaatgagagattattctacattatctcagtaggcctaatataaccacaagggtcgttataagagggagacaggaggtaagcgttagtagtaggagttctgaggacagcagtaagaggttggagtgatgcaagagaagggccatgagccaaggaatgcaggcaacctctagaagctgagagaaccaaaaaaatggattctaccctggagcctccagaaggaacagccctgtcaacaccttgacctgttttgggcttctgaccaccagaactgtaagaagataaatttatgttgttttaagccactaagtttgtggtaatttgttacagcaacaggaggaagctaacgcacctgggaatttatttgaaatgcaaaatctcaggccataatttacatttatccaatcagaaactctgggggtggaaccaatctgtggtttagcaagtcttccaggtaattattatgctcactgtattttgagggctgctgttagaattcagagaaggaattgtacccgtctgtacatgagatagagtataatgttctgccataggtcacatgcttgtttttttcaaccaatcactgtatgtttgtcacagagcttctcctgtggccataggcagtggggcattatgattgaccacagaacccatgaaatttcagggagtttctcaaaggaaagaaaatattattaccagaaggaggatcggatagcttgctggagagacaaaacaaaggctgaccactgtaagtatattactttagtggtcagatagggaaggaaagacattccagcatgaaggaagagtttgtgcaagggtccagaagtaaaaaaacacagaacgtattcaaacacagaacacattcaaaatggcaaaaatgattatagcaacagtatggcatcaagaaggtgtgggaggaggtgaagagtagtgggaaataagcttggaggtccttcaatgccatactcatgagcttggattacgttctgtagtgatgggggcacatacagtggtttctgagcagagagtaatatgaggaatgtgggctttagaaggcaaactctagattctcaccattgcctgaatatcaggcccccttagtactaatctctgccatcctgtatgcatactgaatgttgattctgcatgactccagggattctctatacgtaaatttttatcattatgtgtttgaatgatggttttcacctttggaaaacttaggctttcaaactgttagatcacctacagaaagaaatacatgtatatgcacacacacacacacacacacacacaccccttcatgaaactataccctttattattatttgagatatgttctactatattcaattctattgtagcttttaaaatttctcgttacaatttcctaagttgatgtcaagacccactattgggttctatcctttagtttggaacttactactctaagggaaaggggcagtgttttattcacttctgcatctatcagttcttagcacagttctctgcctatgttagatcaccactaaggcttaaatatcagatccagtgaagttttagccagagctgcgaacattcttggtaccatatgatagcacatttcacttgccaagtattggatgacagattattaagacacatatacaaagctctgaacatttgggtgggtgtattggtaggtgggggtggaatgaagggtcagtagaaatgatgatgcatcttctctgtaattaatgtcaaagcttaagaagaacattagcagatcaattccttataacaccacaatgaaacattttcccctgatcagaactgctttaaatgaaataaactttgctctgtgaattaggcaggtatcattttgggatatgaaacccacaaaactgtcatcaaatacagaatgatgagagctgtgatgctaggttgtacatagaattccagttctggaaaagctgtcatttgaatggcattctcttttcctgcaatatcaagaagatccacagacgctgatttctgggctatggagctgggttagatggaagatgctctggaagggcttccctttggtggatttttcactttctgaaattcatcattttcattagctttatactgtttttgtctttatcatttcaggtgtgaattacaattttttttatcttatgctgtcatcatttgcattactgttgtgatgtagtggctgattacagctctgtatgaagaagtgttttgaggctgtacttgggctcagccagacaaagtacaaagtacaaagatgtctgccatgagtgcaagcttcaggagtggtgagcctatatgtcccatgcttgccatcctcaaacactacatttggacagtcatcaccttcctacccatcagtatgagacttagtttaggccatcctccagatctgtatgcttgcctggtttgtgctgctctcatggttacagagccaggtcactaatgctgctgacattgttgctgccaagggccaaaggctgttacagtgactgctcccattctctcaagtcagcctgtcatctcccccagggctcccatgttgccactgaggcctgtgatgcactagatggctcagctcccacgtatgtgcaacctggaattcatctccttcttaccctgacttattgtccaaaggagctgtcattcacacagcctgcctcagaagatgggtcctggagatctgacatcagttgtgctgagtaacagtggcagccagctcagaaatatacccttgtatctatctgcttgttctccgtcccttcctcatttccttcttctctccctcttccttccctggatggcacattccaataaattaggattatgtaagattttgcctcaggctgtgctttctgaggactctgggctaagccaacatcttagtaagtgtgtgcattacacacacacacacacacacacacacacaagagagaaggtaaatcggattgagataaaaggagccatcagaggttacttagttaaatatctgtccaagaaggcaaggagtccttgaaaagaagcttatatgtactttcaggggagttggggagactgagtcaatcatggtgttttttgtccaaccctgccccagagagttggtctgacctccacagaaagaggaccctttaagtaaaagccaaatggaaatagaccatgagatgagagattagtaagattcatccacttcctcactgtaaaaatttaaatagtgatggaagctcttgaaggatccctgagtcaaaatgatgttctagtactggaattcaatggtaatacttataaagattaaagtctcatggaagggaaagacaataagcagtgaatagccaaagaaagaaaataatggcagtttatcacaggatacaagtgatacgaaggaaatgaagagttgcaacagagaataacagagtgagacagggagagtccccattgagatctgttagtcagggaaggcctttctgtacaaacggggaggagggagagcattctgagcagaaaggacaacaaatggaaggccctgaagtggaaaagatgtgttcgaagaaatgaaagcagaccaggctgattatatttatgaagcatttactattgactggcaatattcctagcactgtatacgttgtatctcactttatttctaataatccagtgagatatgtaactttccatgtgtaggaactgaagtgcagggaagctaagaagctggcccaaagctccacagttcacatggtaaacagaagacccagaattctgacccaggcttctcatgggaagcagtggactttgagtttataaccttcactggacagtctcctgtagagcaaggctggggccaagtcctggaaggccccgtaggccagggccaagggctttgactttattctgagtgtagcagggaaagcactgaagggttttaagtctaggaagacatgatccatttagtctttttacaagatccctcttgctgctttgtgcagaatgaactggaagggcaagagtggaagcaggacattaggaggctgtggtagaggcccaggtaagaggtgatggtaattaataagcaaccaacagggtatctgccgagatggagtgaaggggaggactcgagggatgttttgtaggtaaaattgacacgtctttcttatggattagaagtggagggtgagggctgagcacaatggctttcatcccagcattttgggaggccaaggtgggagaatcacttgagtccaggagtttgagaccagcctgggtaacatggcaagaccccatctctaaaaaaaaaatagccagacatggtggtgtacacctgtagtcccagctactcaggagactgagaagggaggctcaccagagcccaggagtttgaagctacagtgtgctatgatcatatcactgtactccagtactggcaacagagcaagaccctgtctcaaaaaaggaaagaagtggctgggcaccgtggcttacgcctgtaatcctagcactttgggaggccgaggcgggtggattgcctgagctcaggagttcgagaccagcctgggcaacacagtgaaaccccatctctacgaaaatatattttaaaaaaattagctggtagtggtggcgtgcacctgtagtcccagctactcgggaggctgaggcaggagaattgcttgaacctgggaggtggagattgcagtgagctaagatcacgctactgcactccagcctgggtgacagagtgagactctgtcaaaaaaaaaaaagaaaaaaaaaaaaaggaaggaagaaaggggagaaggagaaaaggcctggtcagagatgttgccttgggaccttagcaaactttcacttttattcaacccaggcagtagagggtgacagtgttgggcagaagggtattatctgcatttctgcatggaacatcccagcatggctttcatgccagaagtactggggcagccagggctgctgctgccttgcagagcccttggctatgaccccctgggaaaggaaacacccttctccaggaggacactagagacagggtccatggctaggcattgtcctcaagagggaggccctcagcagagaggaagagcagggtaccatgggagattgtgtgagtgagagcacgcagggaattgctaaaataggggggctgtgaggtgttaatgtgacctcatttgtatctaaacaggtatttgtagtatgcttaaatttatgtcattttttttactattggcaactgctcagaaaggttgaaattcagaattaaaaggagtcatgaagtcaggaaaagtgctaggctaccaggtggctacagtttatattgaggcacacacatttagatttctcccactttcctgtgtcatgctgacttcacctagagaaagaaaagcatccagtgtaaatgtccccattcccccatcttttcctgagatggacccaataaatgagtgggagtggtctgagacctgctgggcatacatttctggaaccgacatctgggagttatgagtaggcagagaggagattttcattttctgtgataacttcccacagtaagtaggtgggagggtgaggtgattgatgagctaaattagatagaaagtggctcacatcagattctaggtgattgctcctgcctctcaactcactgtacttattttccattccactcatttagcaaatgatcatggtctgtcttgtgacattccttatattgttgcttcattctttacattttttgtggtgtttttcccctcttctttcttcagctacgtcagttactccttagggacagaaaagatgttgtgtttattttttttatccttcttatgctttatacagagtaaatgcacaatgattccctgttgtttgactgatagttgctgttggagatggaatgttttctaaagaatgttgctgaatttatcttgtcttagaaacgtggaaagtagggataaggaagacgctcagtgcatttcagtttaaaatatgcagcttttgagtagatgaatttgagataactctgttctggtcagcatagctcagccacagaaatggtttagtttttcatagcagtgaaacttcctttctctaaacagcagatgaggttgaatcacatgaaattgccagtattggagcaacaacatggcaatatcatgtggctcaatctaataagacagatgagctgacaataatttattcctttgactaagtccgagatggaaatgagctaatgggaaggaggcccctcttctgctgtcacagcttgcaggagagagaacagcggaatgcagatcctgggacagagggggtgatggcaggggcagcaatccctgaatgagcaatgattcttgtcatgagttggcacttctgtggttggcacatccttcctgctctgatgctgccctgagaccctttagtgtcatctaaacagaagtcatgacgggcccagaagggtcaggcatgatccataggagttataacacccatccgctgccagccctgtctgccctggagaactgccagaggaggtaggacatggcagctaatgtcactacttcacaattttcttctatttccctctttgtctctactacacccaataaagtagctcctcctcctttttccctctttattaaaccctgagttttgagcgctttgttcagtctgctgatgtgggaaggttggagaaggctggcattaactgttttttctttaattcctctggttaactctgaagtatcttcttgattcctttagagaaactcagattccccagctggatcacatgggaatgaagggacacttttgccttatttactatgggagcaaagggagcccaatttcagattggaggagagagactgggaagaggggagcttgagaagaagggaaatctgttgttggaaacaggagccagagaagtccagaagagcaagcctaagaactgaattaattgagggcaagtaaatcatcagatgtattttcatcatttgatacagcaagaaatattttcaaattttcctcatttgatatagcaagaaatattttcaaaaacccaatctgttctggattttgtcattactgaaagcatgatcagagaatgaatttctggagtcagaaaagtattcgaaatgggaagacatgcttggcttaatgtggttacaactctacacaacccatagctgtagatctaaggaagagccaaagtcatggtattaagaaaaataaagatgtatttaaacattgttgcaccctaccttcctttttattacctgtagatagaacggttgtgctttaggctctttagtcattcatttcataatgaatgtgaacctacctgatgatgcacatgatctcatttgttccttgtagcagccctgagagttaaaaaatggcatacccagtttatagatggagaaaatgaatttaagagggattcaaaaaactcgcctgtgaccacacagattgcaaatcagttgcagagttggaattccaacccaagtttgtttgattctagaaccagtgcttttcagactatgtcatgctttatttctctttactgcaggcccctgaaaaaaggagaagtagtcaagtgaaatacctgtaaagaaaaaggcccaggataggccactgccccaggctcaaagactaaccctgaggcttgggtttccctaagagtagaagtgcagaatctgaggctccaccccataatcggaaacggcattttaacaagatcaccaactgaagcagaatttgaggccccactctagaatcagaatccacattttaacaagactcccaagaaatctgtagccacgttaaagttctagaagcactaccctaaccaccccaaagctgcttctgtctacttccttcatcttgggttctttaaggacctggctcaaggaaagtacatggttgatgattgcccaggtgttaactgacaagacaatcataaacaacaggagtcaggtgtattttttctcttttcctttgacaccgcctcttctctttccactctttttcacttgcctgtatgacaatgaagtgagaaaagaatgaaagaaagagcataaaattaaggaataggaatttctgacaagggttttctgtgccagcatcatgcctccttccaaaattgtgctaagcaacatggttagcaatgactctgtctttttgtttttgtttttgagatggagtttcgctctcgttgtccaggctggagtgcaatggtgagatctcggctcactgcaacctctacctcctgggttcaagtgagtctcctgccccagcctcctgagtagctgggattacaggcatgcgccaccacacctggctaattttgtatttttagtagagatggggtttctctatgttggtcagcctggtctcgaactcccgacctcaggtgatttgcccatctcagcctcccaaagtgctgggattacaggcgtgaaccaccgcacccagccacaatgattctaacagagcatgccagcatcccccactgctcagcacacacttttctgaattattacagcatctgcaattgtttggaaaactgagcacatttgcttgtttgttcaatccagacaatagctgtgtaggttttatttgtatttcacacacactcatacactcaagtttcttaagggtggctgagcagaagtatgatacatttcaacttttaaggacaaatttgaggaaaccgccattgactgaacaccagggttcagagtggctcattttggtcagaatgctgaacttgccaccggtaatgctgactgctcttcaccacccaggttcactctcagctctgagaactatttgcttccgcttccagcaacagtgaaaattagcttacacaattttcgctccctcattttttaccccgtgtgtgattatgaatgatctgtgaagcagaaagaagacaaaagaattgtataagctgggtctaccctgtggtctcaacagtaattcagtaaatgtgacatgggtgtcaacaggaaactcatacacccatcatcagaccgtcatgttgatgatgaaaaacaagtccgatttctttcctacagggcttactttccaacctgccaatatgtaaattcttcagcaggagttaataaaggaaatcctttaatagaaattcaggtccctttttaaaaataaaaaaaaaaaaacaagtattcagagcactggaattttcagttaatagtggatctggagaggaaacatttctttgctgtccctgcctccatggtaaaagaaaatattgaggaaggaagaaatgagattcaaactttaagataatttggagagccaaatgatattatatacacaggtgtggaatgaggaatattttgtttcatgtgtcacatctttcattcatcaaatcactgtccttctcaagggttcattaagaaaacatgttcttcacagaaacagtgatgaaacaacagttgataccaccaggtaaaacaaaacagataatgggactacctctttgtctcattagaatatcaccctgtgacattatgtttcattcctttttatagagacatggtttttcgtttgtttgttttaaagatagtgtcgtctttggatctggatttgaggtggtgagcttgcattgggttgtttcaaagtatgttctgaggccgggtgtggtggctcacgcctggaatctgagcactttgggaggccgaggtgggcagatcacctgaggtcaggagtgcaagattagcctggccaacgtggtaaaaccctgtctctactaaaaatacaaaaattagccaggcatgatagcatgtgcctgtaattccagctacttgggaggctgaggcaaaagaatcacttgaacccaggaggtagaggttgcagtgagccaagatcccaccactgcactccagcttgggcaacagagtgaaactccgtctcaaaaaaaaaaaaaaaaaaaaaaaaaaagaaaaagaaaaacgaaagatacaaagtatgtttggaggtgttatcctgaagaaagcatcttgcttcaaatgctttatgaaaatatttagtgaagttaataaacggtctaagaatttccactgtgtagaaagagttgatttgatttcatttcagaacagtcttaatctgaaattggcattggtaatgatttgaatatgtgtaattctcttagcctaagatgtggaatatatgtcaaattatatgttttatatcaacttgtaagctactggtgagttgtgagacaatttagggattgcttttagtgaaattatatagaatagaaaatatgagagttcatttaatttggtaagagttttgtaaatgtatatgcatacacagtcatattacagatagatatagaaatacttttcactgtgggtcatattcaaaaaaggtttgaaaactcctgccttgatgaattttgacatggtcaaaacatggtatcagccatgattggcacactaaaaattttactctacataaccaacaagcttgtcattgttcttttgatttctcatttgtttggggattttgaaatggctatacttcttttgtaatctttctctctttagtctgttcctcctggagacagtgattagttgtgaatgagggaaataaagccatacttcaagttcagcatacattaactgggcatattttcagaggagaaaatatttcatatatcctttaaaattaataattctgacatgtgcctgcctcatggcttttcagttaccatgactcaccttaatttcaccttaatgccactgtctgacattagatgcctctccagagagtaagaaaatcattcagaaattaggtgcataaaggttattaaactaatatttaaagttctggccctgcacattttactttcctcctaattaaatgccatgagtagaaatgtatgatcctcagtatgtgcacctgcttgaattcgtgtccacttgaaggacaataaagatgctgaggaattctcattttatttgcagcctttctcctgggaatattacttacagctaccatcagtaaccataacttaagccaaagccgaagacagaattttaaaaacatgaaacacatagagatttccttcttttttggaaacttctgtaacttacttcatccccaaataactaagctctgtgaggaataggtgaaaaatgccaataatactctaactttggaacttcaagaatggggctatgttatttgatattattgataaatttcaggcctcatgtcttgggcatcctgtaaatgtaggtgggaaagtaaaacattatcagtggactggaataaatcttatcaccacaaaaacatgttcctaatgctactgcgtcttttcagttttgttcttaaacctgagggttaatcactcttgttgacagacttggttgctgctacacacttttttggtatagctatattagtaagaactcttggttccaggtctgaaacccagtcctaataaactggcttaggcaacaaagggcatttattgattcatgtaactgagaagttttaagtagttttggcttcagtcttaggcaggtcttcattacgtggtgataaccacattgaatctttcattctatccctttaccaaccagcagcaattctctttccagtagtgttcataaaatccaagtactgagtctcaatggaataatgtagatcacatgctcatttctgaaccaataactctggccaatgggatgaacagggactgaccagacctgagtcacattcttatatttatattctaaaggcaggaggaggagaaggttctctaaagaaaaaagatagtggctattacaaagcaaaggttttatgtaaattttgtatgaggaaaaatgggaaatgttactgcagaggttttctactggctatttcaaataacttgatatcattaatttttaaaaagtggtaatattaactaatgtccacctgagttatcaatttaacaaatatgtagtgagccaggcatagacattaatgtctctgagcctatgaattgtgtgcatgattttgaacaagcgtctgtaatattttattaaatgattttcatcaccctggataataaacaggtgatttgacttagcagaatgcaggtgctatttttaatacttagtgctctctggaggccttccaaataataatatcatctttaaaagctttggattccccaaggagcaataaaattgtgctgagtattgtctgtgataaataacacatctcccttctccactcttccatactcctacttgagaaagcttcagatttcctgacattatctgagggttgattgcctagtgaaggtcaatacttctttgttttccattactacatgtttctttgtgatcataccaaaatgatgagaatgtgaccagcttttaaaatattaaaaatcagggaaaataaaagcatgaatacatcaacaaggagcgtaacttaagattttagtttctaaagtggaaatagcttaaattctttcctgaccagtggagttcagggctaccaacaaaggactggaggaaacaagatcccagaggaaaggagccacagagatgtaagttcaacatactgcatggaattttcccttgaggcctttttgtacactcccagggagagacaacaaaatataaagctgaaaatatctgatacaggagtaaatggcaaagcagatattgtagcagtctcagtgtctcacagagttcagggctttcaaagaagtaggaccatggaaatactcaaggtccttgaggcccctgaagaactacaacctagggtaagagcaaactggaaatataccagcctcaactggattaagatgattttcctgtactctatctgcctgccagaagaaaatcaaatcatctttggagaaagataacatcattcaaaacttgtacaatttccataaaaagtgtatctgtcattcactagaaagtagtaggcatgccaggaaacaagaacaaatggccaataatcaagacagaaaaccaaccaaaagtaacagatccaaaagtgactgagaaattggagctataagatctatagctataatctgtttcagataagagattaatatgttcaagaagagacagagaatttcaccagagatctagatcctatgaaaggaatcaaatgtacaacatgaaagttaaaattacagtaagtgtaatttaaaactaagtagataggtttaataatagagttgacacaacagaagagaggattcatgatctggaaaatagatcaagggaaaatatccagattaaagcagagtggaaaagagaatgcaaaaataaagaaaattttataagagacatattggttagtgtaaaggtctgtgtcaggcaattggaggcccaagaggagatttcagggaagatggggcataagtattatttgaagaatagcagtaaagaattttccaaaattaatgaataacatcaagccatggattcaagaaactgtgtaagaaaaaaaaaaagccaaataaaatatggaggcatattgtagtaaaactgcttaaaaattgaagacaaataaatgcatcttaaaagcatccaaaggaaaaaagatatattttcaaaggcacaccaatgagacataaagctaatttttaaaccaaaacaatggaaccaagaaaacaatgggatgccatggttaaagtgccaaaagaaagtaattgccaattcagaattttatacctaccgaacacatccttcaaaaaggacatttttagaaaattaaaactaagataattaattatcagcatatctatatcaaaactattaaaaggagctcctcagtcagaggaaatagtcccagttgaaatcatgtaaatgaaggagggcatgaagaacaccaaaaagtataaatatataagtaagtgtctatgaatatggattgtttaaaacaatcaaagtaatgtttagtggagtgtaagtcctataactaaagatagaacaatttaagcactcattgacagtaactgcagcagatgcaaattcatcaaatattttatatccatgagttcataacattaagaataattataaccgattggttaccatggaaagatgttagtgaaccaatttgttgttttgaaaaatggtatacaaatgtaaaaaatcaagcatttgttccacatctcttgtatgactaagtaaacatagatgggggaattttctcttgataataggattcctgctaataaatgttttaaaagtgtaatattcttatttttttattttaatgaattaacggatccaggccctgaatatttatgggaaaagagaaaagaacataaaccactagccatgaggtaatcttaccaaaaacaaaacaaatgaacttgaatctgcatgcctctagatctaactgcaaacaaacagaaattacagctaggaagcattttatttaatacaatacccatgggggaaaaaacatcagagcgtggaaaacttcagttccaacaagcccctttctccaatgcatagatagcaagggggcaaaaaaaaaaaagattgagggagaatcaataggttaaattaagcttaaaggacaaataaaccaatcacagtatgcagaatttatttggctcttgatttcaaaatacctataaaaatggttatcacatttgagacatttggaaatttgagtatttccagagtatttgatggtattatgcattatttatttattgagacagagtctcactcttgtcacccaggctgctcactgaaacctcccgggttcaagtgattctcctgcctcagactcctgagtagctgggactacaggcacacaccaccatgctcggctaacttttgtacttttttagtagagatagggttttaccatgttggacagactggtcttgaactcctgacctcaagtgatccacctgccttgacctcccaaagtgctgggattacaggtgtaagccactgcgcctggcccattatcattattttttcgtatgtgtgataatgacatcatagttatatattataaaaagcatactcatcttttggatatacatacagaaatagtcataagaaatgtaatatgatgtttggaatttgttttaaaataatatatttggagagaaaatggatggggatagagatggaacaagattggtcatgagctaatgattgctaaagcaggatgataaatatgaacgtttcattagattattaagtctatttttgtatatgttgggaattatccataataaaaagcttgaaaaataaaatatttgtggaattaaaataaaggcaacaaacaataacaggtagaatgagagtggattaaatgaagttaaaataatgtgaaatccttatccagacaggataaaagtatcaattatggtagattctaataagtcaagaaatcatattttcatttccagggtaaccacttaaagaatgtacagttaccaagctgatagagggggaaaatggataatataaaatatatttgattaattgaagacaaaaagagaatttaggaacagaaaactgtgagacaaataaagaatatattaagatagtgataagaatataaatataaccttaattatattaatacaaaacactaaatacttctatttaaaaacagattattagactggattattaaaacaagacaactataagctaactatgtgaggtacagtctaaatataaatccatataaagattcaaagttgtaaaaagagaaacattgtgcaaacacacagtattccaaaagaagcagacatagctatatgtataggtacatatagcatggtctcaaaatatttgaaagcaaataacagcactaaaaaagagaaatatacaaatcttcagccttagttgggattttaccatacctcttcaggtagttaatagaatatgaagacaaaatgtcagtaaacggctgggcctggtagctcacacctgtaatcccaacactttgggaggccgaggcaggcagatcgcttcagtgtaggagtttaagaccagcctggaaaacatggcgaaaccccatctctacaaaaccaaaaaattcagaaggctgaggtgggaggatcacttgagcctgggaggcagaggttgcagtgagctgtgatcatgccactgcactccagcctgggcaatagagggagaccctgtctgaaaacaaaacaaacaaaaaagtcagtaaacatatagaagattcaaacaccacttgtaacaaacttaatcttatgtatagaacactgcaacaaccaaataagcatatacatttttaaagatttagtaaatataatatatacctagacataagcacttctgaacaaatgtcaaaggctttaaaccatagagtttatcttctgttcacagtagtattaaggtggaaatcagtaataaaatgataatgatagaattccaatatttggaaattaggtaatattttcttccctatgtttcaaagaaagtaatcacaacaaaaattaaaaatatttctgataatgaagatataacatatcaagctttgatgttgcagctaaagcagtttttatatggaaatttatagccttaaattcttagaaaagaagaaagcctgaaaattagtaatctagtaatcagtatcaagaatctaaaaaagaaacagaataaatgcaaagaaagtagaagaaaataaagataagagcagaaattattgaaataataatcagaaataaaaaagcactaaaaaagatattagtaagattttatgccagtaaatttgaacatttaaatgaaatggttaaattccttaaaaatacaactaaatttgatatatttttagggaatctgaattatcctatatctattacagaaattagcttcataattagaaatcttcccacaaaaaagagcccatttaaatttaccagcaaattcttccaaacatttaaggaagaagcaatatcagttatatgtaaactcacatcattagaccagcataaccttgaccccaaagatgaggggtattaaatgaaaataaatccacagttcaatttttttcatgaagataaatgaaaaaaaaatcctagccaaaacattggtaaatcaaatccagtgatatataaaaagaataatatatcattatcaagttgggtttgttccaggaatacaagctgattatttgaaaatcagtcaatgcaacttaccatattaatagagtaaaactgagaaaccatatcatcatctcaatagataaggggaaaaaattgacaaacacattcattcatggtaaaatctcagcaaaatgggaatagagctgagcttccttaatcagataaatatttattttaaaaaactacagcaggggccgggcagggcggcctgtattcccagcactttgggaggccaaggcgggtggatcatgaggtcaggagttcgagaccagcctggccactatggtgaaatcctgtctctaataaaaatacaaaaactagctgggtgtggtggcaggtgcctgtagtcccagctacacgggaggctgaggcaggagaattgtttgaaccccaggagcttgcagtgagccaagatcatgccactgcactccagcctgagtgacagagtgagactccatctcgaaaaaaaaaaaaaaaagtcctacagcagacttcatacttaatttgaaatattaacaattttcttgttgagatcataaatgtgtttattatttccatttttattcatcattatattagagaccctagtcagtttaatataatcttgtgatgggcaagaatctgtgtttttaacaagccacaaggtgacgtttatgcattctagtgtggataacctcattactacatgggctaagatgtgatttgcttcttagtttgaagtgaccacagcctaaaagttggaaaggtgtgaggagaaacacatttctgctctcaactcgggctgccattctggcaacaccttggatcagactggacatggatcttgccactttcctttaaaaattgtttttgtttaccaatacgatgttcaccagatttcttactaatttttttttagttgatcagaagcaagtaattccacatgcatattggcacaatttacttttatttacctacagttgaattttaaattgtagtggcgaattagcatatttaatttttttaatagatggtatttgaatatggctgagccctcttacaatatcagtagtcaatttgtagattatataccgtgggccagtctgatcatggtcctagaaaaataattataaatagtgaaagtctagtgtaatgcatttagtttccatgatgaatgttgcctctcactaacctggcattattaaacagtgaaactattttattgatcttgtttttcatatctgctcttttttcgatttttcttagaaactgatacctgctcctaaaacttaaacattgcataagcataaaatgaatagcagaaatcccctatacttgcactccaaaaccatatttcagcagtaaccattgacacttttgtcccatcctttttacctatgtatttatatatacttttctatattattttcaaagagtcatcaacttggtatctagtctttcaaaatccaagtgtaaatattgaaaccatggttaatccttcctgtcaaatttgacagataggcagtcaatacaccaaagtcttaggtatttgcaatgcttgttatttcacattgttttgtttgtttaagggatcaagcaatgattttgggaaagaatgattaccaccaatgtggtataacagaactgtttcttttgttcccagagcaacgttcatacatattcccacaaatacatttatgttctcatccagtgaatcactgccaggaacagggagcacatatactactgctgatgaaaaatggctgaggaggtgaataaagcaatttacaatatatcaagctaagagtaatggtaatgtatttttataagaagatactatttatatttaacatcaaatatagatttaaatttttgatttctctattccatgaggcataaacatccccatactgaccattgtggaatatgattaagaaccatgacagtttttgaaagagaagtattacgtctactgagataattctctctaactataaaagcatcagctgatttggagtacaatttatagaccaaatcaaatactgcaccttaggactttatgtgtaaaatgtaccacagttctcttacccaattaattaccaacctaaatatctctcagatttgtcacattttaccatatcttctgttccaattgcagtttaaattatcatcattgctacaatagcctcttaattgatacccttgcagccattattgtctccttccaatccattttccacactgtagcttgacagagatttttaaaatgataattgaatcttgccactgtcctggtggaaaccattcatttccaccatttaaaagcctcccttatagtcatcatgggaggaggttccaagatggctgaataggaacagcgccattctacagctcccagcgtgagcagtgcagaagatgggtgatttctgcatttccaattgaggtacccggttcatctcactggggcttgtcggacagtgggtgcagcccacggagcatgagccaaagcagggcgggacatcgcctcacctgggaagtgcaaggggttggggaattccctttcctagtcaagagaagccgtgagagacggtacctggaaaatcgggacactcccacactaatactgtgcttttccaactgtcttagcaaagggcacaccaggagataatatctggtgcctggctcggagggttccatgcccacggggcttcactctctgctagcacagcagtctgagttcgaaccacaaggtggcagtgaggctgggggaggggtgtccgcaattgctgaggcttgagtgggtaaacaaagcggcctagaagctcgaaatgggtggagcccaccgcagctcaaggaggcctgcctgcctctgtagactccacctctagggtcagggcatagctgaaaaaaaggcagcagaaacttctgcagacttaaacgtccctatctgacagctttgaagagagtagtggttctcccagcacggagtttgagatctgagaacggacagaatgcctcctcaagtgggtccctgagacccaagtagcctaactgggagatacctcccagtaggggccgactgacacctcacacagccaggtacccctctgagacaaagctttcagaggaaggatcaggcagcaacatttgccattctgcaatatttgctgttctgcagcctccgctggtgatacacaggcaaacagggtctggagtggacctccagcaaactccaacagacctgcagctcagggtcctgactgttagaaggaaaactaacaaacagaaaggacatccacaccaaaaccccatgtgtacgtcaccatcatcaaagaccaaagatagataaaaccacaaagatggggagaaaccagagcagaaaagctgaaaattctaaaaatcagagtgcctcttctcctacaaaggaacctagctcctcgccagcaagggaacaaagctggatggagaatgactttgacaagttgagtgaagaaggcttcagaagatcagaataacaaacttctccaagctaaaggaggatgttcgaacccatcgcaaagaagctaaaaaccttgaaaaaagattagacgaatcgctaactagaataatcagtgtagagaagaacttaaatgacctgatggagctgaaaaccatggcatgagaactacgtgatgcatgcacaagcttcagtagccaattcgatcaagtggaagaaagaatatcagtgattgaagaacaaatgaatgaaatgaagccggaagagaagtttagagaaaaaagagtaaaaagaaatgaacaaagcctccaggaaatatgggactatgtgaaaagaccaaatctacgtctgcttggtgtacctgaaagtgatgaggagaatggaaccaagttggaaaacactctgcaggatattatccaggagaacttcccaaacctagcaaggcaggccaacattcaaattcaggaaatacagagacaaccacaaagatactcctcaagaagagcaactccaagacacataattgtcagattcaccaaagttgaaatgaaggaaaaaatgttaagagcagccagagagaaaggtcaggttacccacaaagggaagcccatcagactaacaacagatctcttggcagaaactctacaagccagaagagaatgggggccaattcaacattcttaaagacaagaattttcaacccagaatttcatatccagccaaactaagcttcagaagtgaaggagaaataaaatcctttacagacaagcaaatgctgagagactttgtcaccaccaggcctgccttacaagagctcctgaaggaagcattaaacatggaaaggaacaaccagtaacagccactgcaaaaacatgccaaattgtaaacaccattgatgctaggaagaaactgcaccaactaatgggcgaaataaccagctaacatcaaaatgacaggatcaaattcacacataataatattaaccttaaatgtaaatggactaaatgctccaattaaaagacacagactggcaaattggataaagagtcaagacccatcagtgtgctgtattcaggagacccatctcacctgcagagacacacataggctcaaactaaagggatggaggaagatctaccaagcaaatggaaaaaaaaaaacaagcaggggttgcaatcctagtctctaacaaaacagactttaaaccaacaaagatgaaaagagacaaagaaggccattacataatggtaaagggatcaattcaacaagaagagctaactatcctaaatatatatgcacccaatacaggagcacccagattcataaagcaagcccttagagacctacaaagagacttagactcccacacgataataatgggagactttaacactccactggcaacattagacagatcaatgagacagaaagttaacaatgatatccaggaattgaactcagctctgcagcaggtggacctaatagacatctacagaactctccaccccaaatcaacagaagatacattcttctcagcaccacatcgcacttattccaaaactgaccacatagtcggaagtaaagcactcctttgcaaatgtaaaagaatagaaattataataaactgtctctcagaccacagtgcaatcaaacaagaactgaggattaagaaactcattcaaaaaccgctcaaatgcatggaaactgaacaacctgctcctgaatgactactgggcacataaccaaatgaaggcagaaaaaaagatgttctttgaaaccaataagaacaaagacacaacataccagaatctctgggacatatttaaagcagtgtgtagagggaaatttatagcactaaatgcccacaggagaaagcaggaaagatctaaaattgacaccctaacatcacaattaaaagaactagacaagcaagagcaaacacattcaaaggctagcagaaggcaagaagtaactaagatcagagcagaactgaaggagatagagacacaaaaaacccttcaaaaaatcagtgaatccaggagctggttttttgaaaagatcaacaaaattgatagaccactagcaagactaataaagaagaaaagagagaagaatcaaatagatgcaataaaaaatgataaaggggatatcaccactgatcccacagaaatataaactaccaccagagaatactataaacacctctatgcaaataaactagaaaatctagaagaaatggataaattcccggacacatacactctcccaagactaaaccaggacgaagttgaatcccttaatagaccaataacaggctctgaaattgaggcaataattaatagcctagcaaccaaaaaaagtccaggaccagacggattcacagccgaattctaccggaggtacaaagaggagcgggtaccattccttctgaaaccattccaatcaagagaaaaagaggaaatcctccctaactcattttatgcggccagcattgtcctgatatcaaagcctggcagtgagacaaccaaataagagaattttagaccaatatccctgatgaacatcgatgcaaaaatcctcaataaaatactggcaaaacaaatccagcaggacatcaaaaagcttatccaccacgatcaagttggcttcatccctgggatgcaaggctggttcacatacgcaaatcaataaacataatccatcatataaacagaaccaaagacaaaaaccacatgattatctcagtagatgcagaaaaggcctttgacaaaattcaacaatgcttcatgctaaaaactcccaataaactaggtagtgatgggacgtgtctgaaaataatgcaagctatctatgacaaacccacagccaatatcatactgaattggcaaaactggaagcattcactttgaaaactggcacaagacagagatgccctctttcaccactcctattcaacatagtgttggaaattctggccagggcaatcaggcaagagaaagaaataaagtgtattgaattaggaaaagaggaagtcaaattgtccctgtttgcagatgacatgactgtacatttagaaatccccatcatctcagcccaaaatctccttaagctgataagcaacttcagcaaagtctcaggatacaaaatcagtgtgcaaaaaatcacaagcattcttatacaccaataacagacaaacagagagccaaatcatgagtgaactcccattcacaattgcttcaaagagaataaaatacctaggaatccaatttacaagagatgggaaggacctcttcaaggagaactacaaaccactgctcaatgaaataaaagaggatacaaacaaatggaagaacattccacgctcatgggtaggaagaatcaatatcgtgaaaatggccatactgcccaaggcaatttatagattcaacgccatccccatcaagctaccaatgacttccttcacagaattggaaaaaactaccttaaagttcacatggaagcaaaaaagagcccacattgccaagtcaatcctaagccaaaagaacaaagctagaggcatcacgctacttgacttcaaactatactacaaggctacagtaaccaaaacagcatggtactggtacaaaaacagagagataggccaatggaacagaacagagccctcagaaataataccacacatcgacaacaatctgatctttgacaaacctgacaaacacaagaaatggggaaaggatttcctatttaataagtggtgctgggaaaactggctagccatatgtagaaagctgaaactggatcccttccttacacgctatacaaaaattaattcaaggtggattaaagacttaaatgttagacctaaaaccataaaaccctagaagaaaacctaggcaataccattcaggatataggcatgggtaagggctttatgactaaaacaccaaaagcaatggcaacaaaagccaaaattgacaaatgggatctaattaaactaaagagtttctgcacagcaaaagaaactaccatcagagtgaacaggcaacctacagaatgggataaagtttttacaatgtacgcatctgacaaagggctaatatccagaatctacaaagaacttaaatttacaagaaaaaaacaaacaaccccatcaaaaagtgaacgaaggatatgaacagacacttctcaaaagaagacatttatggagccaatagacacaggaaaacatgctcatcatcactggccgtcagagaaatgcaaatcaaaaccacaatgagataccatctcacaccatttagaatggcaatcattaaaaaatcaggaaacaacaggtgctggagaggatgtggagtaataggaaaacttttacactgttggtgggactgtaaactagttcaaccattgtggaagacagtgtggcgattcttcaaggatctagaactagaaataccttttgacccagccatcccattactgggtgtttaccaaaaggattataaatcatgctgctataaagacacatgcacacgtgtgtttattgtggcactatttacaatagcaaagacttggaaccaacccaaatgtccaacaatgatagactggattaagaaaatgtggcacatatacaacatggaatactatgcagccataaaaatggatgagttcatgtcctttgtagggacatggatgaagctggaaaccattctgagcaaactattgcaaggacagaaaaccaaacactgcatgttctcactcataggtgggaattgaacaatgagaacacatagacacaggatggagaacatcacacaccggggccacacaccggggcctgttgtggggtggggggaggagggacggatagcattaggaaatatacctaatgtaaatgatgagttaatgggtgcagcacactaacatggcacatgtatacatatgtaacaaacctgcacgttgtgcacatgtaccctagaacttaaagtgtaataaaaataaaattgaaaaaataatagtcatcatgactggtgtaagatgtttctcattgtagttttaattttcccaatgtgatttagagtccaaccaagagcaacagtgaagtgctctttagacgtcagattatgatttctttcttcaccacacaacaaaaaagaaagagaaagaaagtcatctctcagtcgactcttggctcttagttcctgctgacgttggagaccctcatgggatattccaagtgttagatagggtgggaagaagggaagagggaaagcttgaaacacaactctctttatttttcttcttattcaagtagtatctttttacctttggaattcggaaagcagtgatgagggtaaaaaaaaaactgccccaaaacttatcattcagagataatcaccttatattttagtgtagtttaatctttgttttttaaaaacattacaaagtatatattttttgctttgtctatagggattcttgttgttgttgtaattgcaaaagcaacgcatgttcactgttgaaagggttggaaataatcaataagaaaaagaaatgagaatgaaaattgccctcaggctcaccaaataaacaccaaacagtgttgacattaaaaaaaaaaaaaaaaagaaaaagcctctcctgattctcccatcttgctcacctggtttttgcacgcaaactacactgccctttttcctcctcaaaatctctttctttctgcctcccacagagcatttgcacattcttgttccctcagccccatggaagtttgttttcttcatctccagtggcttcattttctctcttcagatttcaactcaaatgttttctcctctccaaactaggcgaaccccttatgggcacctgtcactgctctgcattactatttcctcactgcctttctccccaacaagatagtgagctctgggtgttcagaaaccacatataatatgtttttgtccagttgccagctcagcttggcatatgctgtttgttgaacatacaaaagaatgtatgtaaatttgttaatagaatggagataagatgattgcagctgatgatgctatgatctgtgactaattatgggaaataacttcaaagggacatcaagggcagaagttctgttgaaatataaatgaaagggctgatttttcagacaaggtaattgaggctcataagagttaagaaattagcacatgaaatcacagccgctgacagagccagaatttcaacctaggtctgcctgatagcaccactatgcccaagagcagttacatttataaagcctttaaataatcataaatgctgcatactctatcctttggaaaattcatgaggaccattatgaatattaaagacagacaattcctgaagtaaggaaacctgcttaagttaatgttaatatccttttcatttggcaaattccctgaatggaattcaccttggcaagtgtggctgtcatttcttcatttattcctttgtccttagtttgctttttctgtccttactacattgattataattccattgctaaataattccgattataattccattgctaaataattctttccaaagaagacatttgccaaatacttccacctagctggaaggagaagacaaaactcccctctgttcaagataaaacattgtcttttaaagttaatctgtcataacttagggtcaagtgtccaaagacatggaccttgtttaacctttctgtctcagctatacttactgccatgaaattatgctctgtccctcccatatcatttaggctaccaaattgcacttgatgaagggccaccaaagacctggaatggcagtcaaaattggaacattgcaactatttttcatgggtaaagagaaacatttggtcaaacttgagtccagttaccaatgataaaacataccagtgtaacctttaataattgctaaagaacaagacttaagtataaataatactacatctattttatttttagcttatttcatttaaaaattaattcttgctaaacagttctcagtgctagggaaatttgccaaggctcatttctttaaaatggaacataagtcttgctggacatgtatatactgtacttctccagatttctcataagtttaaatatatgggttttatgtctaggtagagaattttaccgtgccttattctataccaggtatatttatatctatatcaatacaggtatattgagaaaatctatgcgtatctacaaactgacaggaggtgctgtgaaggatttttagcttaaatataagcacagattcttgaaagccccacaacaatgtgatattgagtctgtagtaattcagagtgatatgtgtagttcttttctgagtaaaagattttaagtgttttgttgaaaatttttaagtgcgtacaaaagaataaggaggaatctagtctaaattcagcatttttaaaattagctgctaaaaattaaaaaataaaatttttgacatgtctgactacagaatgtatttatttaacaaacaggtgttaagaacagagaaggaggattagacagtatctgtgctttccagaagctcacctatgtggaagagataaatagacagttgtgcatatacaatatcagttgtgctgtggttaggcaccacagcaagggaaacaggtgctttgtaaagggacatttgccttatacaagatcagggactcaggctgggcttccgagaggaagtgacacttacttaagctatgacttctgtgtctcccagttttgtatggtgaagaaattgacacaggagggcctgtgttaccttcagttaactgaaaaaagaatatgcagttgttttgtaacaaatggtccttttgtggcaggatgttttggctgtggacagaaaagaagatgggcccggcgccatggctcacgcctgtaatcccagcactttgggaggccaaggcgggtggatcacaaggtcaggagatcaagaccatcgtggctaacacggtgaaaccccatctctactaaaactacaataaattagccaggtgtggtggcacgtgcctgtaatcccagctactcaggaggctgaggcaggagaatcgcttgaacccgggaggcggaggttgcagtgagctgagatcgcgccactgcactccagcctgagcaacaaagtgagattctgtctcaaaaaaaaaaaaaaaaaaaaaagaaagaaagaaaagaagaagatggtgctgtgtttttctggctctagtttgcttttgtgtgatttctttgttttttaatgctttttactatgaacccatacaaagctacatgatgattatctctgcccggcttagtatctgattttgaacaagatatttttagaagtttagctgatgtgtgtatttcatggggagggtgtgtaaagtagtgcataatccaggctttgttgcagtactgcctgaccatgagcccttctgtgagacctgctcttctacccaaagggctggtatctaagtcaggtttgcccagtgtgaccccccgaaactgaaatattcacaattcattttttgtaggacgctgacagtagaagcctgtggcctaacgtatacagatgtattttaaaaatcaagaaatttcaatgaaaatctggatttctattattacatatccaaagtggagaggcagcatgagttctctttgttgtaagacccttttcttccagcttctggttttacacctggtcagcatcatacttttaattacctgcctggcccctgtagttgttggaattggtaactccttatgtacagctgtgtctgattaaacccggtgtagacagattttgaccttggttgggttaattagattctttttcccctctgggcattttgaaattgtcttcagggcactacttggtttaaacttaaatcacaagagatacaaatatttggtcatgtcgatgccaaagcagaaaaagcacagctaaaggtagggacaataaagtaaaggttccagaaagaagtagagacacaagaacctgcagcccaagagagagagaatgtttcaacctcggatctgaaaggctgcctacaccctggctctggttcttcataaggcctggctgtacttgctatcctatgtgctgtaggatacctctaattcctcatccagaatccttttacttgaacacttcaggttgggttttgttttttataactaaatggatcttaactaagaggcttacatatgggttttgtgatgtttttgtttcagtagggaaatgtaactttaggtttacaacaatttttcattaatactctatttggattagaacaaaatcttgtaatcattaaatagggtacatgagttgactgttagaaacctttggactattctagttgcatgaggacaaaatcttgacctctgagtttcagtcttccaaaagtagttgtatctattcttgaattgccatattgagattcaactgtgaaaaattgactcagaatcagctaaaaagtttccttccttcttaaccttgatgttttgagaaaagtagtatataacatgttgtatttataaaataatatgcttggagtataataaactaaacacccatgaaccaccatctaccttaagaactgtaacattaccatctactgaagtgtttttgtacctaactcatctcctgcctattgtttccaacagtaaccattatactgaatgaatggatgtactggatgaagtatccattcatgttttccttgcttttcttttatcattttgaaataaatttgtcacatgtatatatgtgtgtgtgtgtatatatatatatatatatatatatatatatatatatgtatatatatgcctaagcagatacattttagtttttaagtattataaaatggttttataatggtttaatctctggaaagaattattgtatgtcagtgcttcctaacttcttccatcatggcatacatagaacttgaaaatattctagaacctcctgatataaatgctctggcttgacacaagactttggctactccaggtactattcaccccagaactaaggggattgggaacacttgtaacccacttactgaggcacactacttggaaagcactgctgtatgtagtcttctccatgtgctatttccacttggatttctgtttctaagatttattcctgtggttgcatgtggccgtagttccttccttttcactgctatataatattcctatgtgaacatataagcattttcatcttctcctgtttagctttcctgcttgcttttcatttacattaagggtcattctagcctaccatgaagtatggaaaactactagatttgacttaacgttttcttaggattcagagatgtgactttaaattttgaatttaaaaacctgtttagttttagattgaatcttggagtatatggtaacaataaatagaattaatttgatcagtaaataagatacaactttctctgtttatgttattaggacaagtctgtttggttgatggtgtttgcctggagtactattggaaaagtattttgagccaagtgagggctctgtggttaagaattcagtaatcagttatggatgtctgccttgggtattcctaatgggagtaaagacatgcttgcttcatatttgccttccctaatctatctgcctccccttctatgatcatcttgaaactatcttgattatctgggtattatccaatttgcagctaacctcttttggaaaatgaaatccatggttagattctgataatttgttattgtctctaactaccttcaccacagttgatgctcttctcacatgtatctaaaacattccatgccttctgtacagcatattttactatcattattgagctccaaactggaaagtaaataaaatgtcctttggtatcctcagtttcagggtttgaactcagctttatgtacatagatcttgtcccctgtaatttaaaataactagagtagcaaagcttctctaaactctccagagcctattaaacattatttttaagataacatctttccttgttcgtcatttatgaatgtttggtcaggaaatggtcgtaaaaagcttcaaatcccaattgaataatgtgttcttaaaagtagctgccaagtgtaaataccactgatatacattcatgcatatgatagtatataaataactggggaaagcatagcaaaggtcaatcaattatgtataggtcagaatgctttccatctggattgagtcattttagcaaatgacatcatgtgtcctttggagtctattttgaaatgtggcttgagtcattatagattggcttcttctctgggttaccgggatggcagtggtgagacttaataaataaatgtactggactctgcaggagcagatttacataattagggtgcagtgatgaaggcttctcattctgcagaaaccctttgggctccattaatttctagttgtttatccttcgtggttgatttttgtttttaaaggaactgaaaacaaaagagtttaaactgagccaaatgctcttcatagaactataatggacatctttccgtgacattgaaagaccagcagggaatcaatagtaatgaatctggcacccttctcgtcttcgtctcttctaacttcatcattgctcttctggatggggctacttggacactttaagtttggtttgtaatttatattttgatctgatgaggagtggtcacaccagattgccagagagaccctagagtcattggcgggttgggatgttgtatgagatgggaagggatgttggcatttttcaattggcacaacaggagctaaatttagctgatagaccacgtgataaaaggagctgccaagtccagtcatttccgattagtcagggcttgaggaggtaaatgttacttgacagaatttaatgtgtgatttttccctcccttcaggatattttggaaatgttaaaaagttgacttttttttttaagtaggatagtttggaatgaaggatttcggtccaaatagctgtcatattttatagacttttatagttggaatccagttcgagccttggaaggaggaaggcttggacattcttagcaaagatgaaaggaaatcgtccttgcgtttagggagcatatagtttagtggaaagacagacatgcaaacagattacgacagtataaaatgacagtcactcaaataagatatgtgtgaatccagacaacatttatatttttggcacttatattatcctttacttgtttgtttgggttacgaataactatggctaaaaaacatgcccccacttgttcttattcttaaggcatattgagagtgaactttcagctttcaagatggatactgtagaggaggcaaaattgtacactcttttagggttttcttttcagctgggcctaagacttaaatgaatataagatagattaatgggagaaaagcacacacatttatttaatataagttttatgtgacatgagatacctcataaggaaatgaagactcaaagaagtggcaaaacctagatggttttatattaggttgaacaaagagaggcagttgtggaaaagtaactcaactgtgtggaaaggctaaaggaagataagaattattttaacaagatctgtttgtacagacttttcctagtctcattttcccatccttgatgataagaatgagactttccttctggtatagctggacgtcttctatatgggggttttgtttcctgttttcaggaagaaaaaggggagggttagagaacacttcttgcacctgctgggttttgttttgtattttaatgtgcctttagctccacataatccttaggctaaagtggcatatttcgggctggcatattctcccactcttcactaccctatgttttggccattcagaggcaatgtggctgcccttctcgtggaatagtactgagattctgcatatgatccaaagccctaactccatttcaatgaaactccatggattcctagggactattctttgattgtgactacacagacaccagaacaaacggttaaaagatgaataaataggccaagttgtcactgacttgtcaagttgcctgtggtatccaacagctgattgcactgctatgttttctttccccactatagtggttggccgagattacaatctgtggtcagtggattgatcaactgattcggtgtggtatagatagataaaaagtggaatctcttttttttttttggggggggggtggggaggacggagttttgctcttgtctcccaggctggagtgcaatggcatgatctcagctcaccaacctctgcctcccaggtttaagcaattctcctgcctcagcctcccgagtagctgggattacaggtgcccgccaccatgcccagctaatttttgtatttttagtagagatggggtttcaccatgttaaccaggctggtcttgaactcctgacctcaggtgatccactcgccttggcctcccaaagtgctgggactccaggcatcagccactgcacccagccaaaaagtggaatcctttctgccccactcaaagagacctttccctttatttagggaaaacaatcctgctataactataaatactagttaatgaagaacaaggtctgtctctgatgttttttgacccccatctagatcattctccttaaatactctcaccagagtttttcttacatcttttagccagatattaatgcttaacccatttcccgtttgctccgagagcgttgtgctggtagcaagctgcacttctttcttctaaatggtaagtgggttaagcatatgatagggtgatgaaggtcgttaggtgtcaagagacctgcattccagtcctggcttcaccattaaccagctgagcaatgttaggcagtgtgttttaccctgctaggtttttcctcttcgtttgcttgttacggttccttttggtcatgggctgccttattgtttggatacttggtgccttaagtagcacctgacaccatagtagatcttaagtgttccatgactcgaaaaacagtaatactaatagctgtaaacagtttctgttgaagggaatgaaaatattaataatgttaagcagctctaagaattttattattggcatgtcttctttgcctgtgcttttgttccttggatgatttgagactccaactcacagcctctagatttctcttgaagaatacaaaagaccctttttcttgtatccagtatttttttcttatgataaaacagtacatactatggtagaaaatataaaagccacagataagcaaaaaacaaaaacagaatctcctgtgtatcaggaatgtgttcagctgcaaaataaagaaaatccaaccaatagtgactttctccaagtctttagaggataatctagagctgatgttttggcatttctcttctactgttcttagcgtgttatttttttgtcttcatggtcacaatgaagctgctgttcctccagacgttatgtttagattggaaagataaaggataaatacaaaaagagacctgttagataaatccgctccttttaatcagacaagaagaaaagccctacctaggccgggcatggtggctcacgcctgtaatctcagcactttggaaggccgaggcgggtggatcacttgaggtcaggagttcgagaccagcctggccaacatggtgaaaccccatctgtactaaaaataaaaaaaaaaaaattagccaggtgtggtggtgcgtgcctgtaatcccagctacttgggagactgaggcaggagaatcacttgaacccaggaggcggaggttgcaatgagccaagatcgtgccactgcagtccagcctgggcgacagagtcagactccatctccactccagcctgggtgacaaagcaagactccgtctcaaaaaaaaaaaaagaaaaaaaagccctacctagcagccttcttctttaatattttattttatagaacaattcccaagtgcaaggaatgctggagagaagaggttatgaatggaagatggctgaccaatgaatgtttgtcaaaccaatggtatacaaagataacagctctcaataaatatgatattacagtatctactgttttgcaatgtgtttccccccttaatagtaccacaaatctttttttgttattaaatattccaccacttaattttcaatgtctgcatagtgtagtcatgcctcacttaatgaaaactgtgtcattagacaatttcatactcttgtgagcatcactttactgaatactataggcaactgtaacacaaaggtaagtagttgcatatctaaacatagaaaaggtaatgcatgcacaatgactttatgacaactacaacgtcactaagcagtaggaattttttagctccattataatcttatgggatcgatatcatatatgtggtctgtcattgatcaaaacttcattatgtgatgcatgactgtattccactttatggctataccataattaatttgaacagtcttcttttgcttggaaatttaagatttccaagttttactattataaatgatgcagtgatgaacatccctgtagatagctttttttccaaactcttttgaccttttctttcattttaattctgctttttttaaaaaagaaatctgcaaataacaacgacgtaaataaataagcagatatttaggtacccactttaaccagagaccgggaagaggaatttttaataactgataacttacattatatctgcaagatgcaaaatatcttattgattgggcaaagccggagaaacaattagtaaattcagcgacaggatagggaggagggaagtgacccgctttctgattaaatcaatttaatcagtttagttaaaatagattaatgtctttttcaggtctggttaaggggatctagaagtttgcagatatgttcattttcagaatccctcatgcctaaaaatatactttcccttggcgttgtgtttctttttgtacaaaggttgtcaaatgggagtgggaaggtggtacatctcatagctcatctgtcagaaagtattgcaggcatagcaaggttgaaaggctggcatccacgctagctaaaagcagagattgcaaagaagtttggcctccaggagagtaaaaggggaaatgctgtcacatgctcccctcctgccaccattggtgtggtatttggtagggggattactgaccccttccttcgcttgagaatagtgggtcagcaaggcaagaatagggcagagagttccggaacttgctaagaacattacctcttgtaatagggctttaagtgtcaacgctttttctactgtatgctaggagtactaattgagaagctggcccctacgcttcaactatatacaactataagtttttttttttaatgttgcaaagtaaggttaatttttatggggaatattttatgccctgctttctgttatgtgccagacaaattgagggcgatggaaaactgatgggtgatgaagacaaaagagcggtgttgaccttttggtaaatcattcatcatactgcttcatctgtaagtggttttcaggttgcagctcatatttgctaatcactacacttgactctcatttctgcaggggctgattgttttgttgtggattgccttttctcttttaaaaaaattttggttattgttatagctgtttcattactaatacttcctccaccagagggggcttgtgaatagagttgggaattaataattcagtttctgctgctcttcattctccttagtagctgagatggactttaagcaatccattcacctactctgttttgagtcttcttgtccccagtggaattcaattacaagatggctgtctttgacagtggccacagtctggaatagttaactagtgttaatggtctagcaccaggatatttttagttttcatgttgatcaaagtcccattagggaaaactaaaggggaaagcaagaataacttcttagttcaaccctgggtcacatactagaaattatgaaattcattatagtagaagcataaatctgtagggacccaaaatggatccaaggctggcatctggcagaatccaccttaccaacattgtagttacctatgggctgttaggtcctttgagccttctgcctgacttgccagtgcttagagttcagaagcaaggttaatatataagacccccttagggatgaatgggcctgtaagacctgcaggctaggaaggacacctagcacctggtctaagtgaggacaattaaggaaaagattttgcctcaaggatgcagagaaattgactggagaatccactagggaatctgagcaattatagtgttgtgctgagtaaccctacagaggctttatcttaattatatattttagggtttattaaactaggaactctgtcccctctatgggctaaagagtattttgatattttgattgaaataaaatgggaactagagacactaagaaacagaaactaaccagaaatgctttacttttcctttatttccaatcaaatgcaatgtcaagaaatatctagatgttatctggacttcgcctatcccctgcctgaagttggaattcttctgttgagtaaatagtccttgggtcccagactggcattgttcactaggttggtgggtgcagatggacagttgttgcttgtaactttgcagccaaacttctgaagacatgatcacaagaccattctggatgtctgtgtgtgtggttgggtgggcatgtgggtacaggttatgaccttttcaaaaataattttgttaagccgcaaattgtagacttgtgaatgcaaccaattagaatacttttacttcatttgggataccaaagaacaaatttctttatatttttaatagaaatgcaaacagcaagaaatatgatttccaaatgacaacaaaatcttttaacagggaattttcaaatgttacattttcctttgttagatatagatagccagtctttggagggaagggacacttagatcttagaaaacacgcgatagtcatagtctattaataccagatgcttcttaggagaagaaataattcttacatgatggtgatattttaaatatttgagggttttttttaagggtcttccacaacaatatggtatagaatttagtctgagaggaggctgaaataaattaaaatgaatttttggaatcctgcttattggaaatgctgatgctattgtgctattagatgctcctcacctcttcctgctacaaatgtacaaacttccctagactcatacctgcccttgcccttttcctcaagactcagagattaagaagaattttgtcttctgaatgcttccttcaccttttactgttctgccccatccaatttgttagccagtagccacatctgactgtttacatttaaattcgttcaaatcaaagtaaaaaattcacatcctcagacacactggcctcgtttcaagggctaagaagtacatgtgcctattgtctatcttataggatggcgtagatatcaacattgccatcatcacagaaagttcttttggatagctgcttgatactcttggcaaactcttaaggaggcttccccatcaccctctccaggggtgtctgtttttttctcagtgtctgacagtggagttggtgtcttctggtattgttcattgtcacttctagacagttccttttctcttcctccgcagaggcttttaaagcacatgccataaaactcttctacagcctactcctctgtatttattgaagacgttccccccagcgccctgtctttatactcatcattctcagtaaaaacatccacagagaatactcatacctggtctatcaggtccctgagtttctcacttgcaaatatctctccctacctcatagtcataccccaggccaatggttcacaatctaggaagtaccactctcctagggagtaattgcaaatgtaaggagtgctactggtatttagagggcagaagttaaggatgctaaatgtcattcagtacatgagactgttatgcacgatgaagaattgttttccccaaatgccaatagtgcccttgttatgaaatgccatgctaaccttcaaagtatgtttcacagcatcccactctctgaccaccacttcctatcttttcagggctgctgcctcaggtgacattagcatctctactccaacagttctttgatcctgtggggcctccaatctgttgacttacaggatttatgtacaatccgtcatcctcctgtatcctcactttcctccttgctcagctcagatgctatggttcttctcttctttacatgcacactgaactcctttgctcatctttctctgtcattcttatctggcaaaactatgaccctcattcagctttccacctactttgggcctgagtgtggatggatggaggacacacaactatgctgactgcagtggatcctctgttctacacggtgatcctgcattgtttacctaatacttctactttctgagaaaactattttatatcttcacctgtacctcaactctccaatggccatccccagctctctcaatcagttgattgtctcacttcttatttcactggagaaagagaaacaatcagaagaaactaccttattttctctagcaaatctacaagcctacctgtatccatccccacagtccccatctccctttctggtattctgcatgaactgtataaaccctgtaatagggaggctgaggcgggtggatcacttgatgtcaggagtttgagaccagcttggccaacatggcaaaaccctgcctctactaaatatacaaaaaataagcggggcatggtgatggatgcctgtaatcccagctactcaggtggctgaggctggagaatcactcgaacccaggaggcagaggttgcagtgagccaagattgcaccactgcactccagtgtgggtgacagagcgagactctgtatcaaagcaaaacaaaaaacctgtagtaactccccatcatccttagaattaaattcaggctttttgctatgacctcaaggctcttcaagattcagccctcttctttttacctagtctcataccactctcctttctccctgcagtctgttgacattggttttcttgctgttcttctcaacatctttgtatttgctcttgcttttgtttggaaatcttctccccgagatatttgtatgcctttgcctcctgttgcacttaggtgtctgctcaaatgtcatcttctcagagaatcctcccttgatcatcttgcctactgtagctttcctcctccctcatcatcctccatctctttgccctgcttcgttttccttcacaagacttacgactccctgatgttgtattataaattcatgttcatctttttattgtcagaatataacttccgtgacactggagagttgactatcttatgacttctgtatccttagtgcctagaacagtgtttaacactcactgtttgttgatgaagtatttaacatatatttgataaattaatgtttcatcaataaagtgtgctgactactatggcaaagactcttaatttggcatgcctctactactcagagccacatgatgactcaattttctcaccacttttctctatttgaaaaattgggaaacttccttttgcactgtcccataatatcatttggctttcatttgatataaacgcatcatttacatgttaattctgcctttgttcttttctcattagcccataacaattaaaatagaccattactctgccacactatgagtttttatgatgtcatatcaaagtctccattaattaaataacttaataaattaaagtcttattccatgacactatctttccattgcaaattatcttcaagaagagcacaatagcagacatgggacaattttagcattaggacatgccaacctagcagccagatgtgctcactgacacactgaaagttaaaagctgtcatttaaagtgattgtttggttccagtgatactgagaacagaacagagttgatggaggaaaaaaaaaagacaaactcaggcactgcttttggaaagcatagctcaattatcaggttgtcatttagattcttcaggacattaattggaataaaaccataaaaacctaaagcatattctcatagaatgtttggagctatgatactgtgcctttgggttcagtttgagaaacactgagctgtagggtaaagttcaaatttcttaacttatactatgcgaccctcatttaactggaggaaacattggattgttaggtggtaggatgaaggcagggagagaaaagatactaattcaattgtcaaggtaacaggtgagagactgggatagggaagaagaaaggtagaagagacagaatgagagctgttcccgatagaaatttttaaaaatgaggaggttgaagaggaaagtacagcaacattggaggtagatgacaagtggattcacttattttcatgttataggtaaagaaataagagtagtagtggattagccatcttagttggggattttctgtgttatatatataagtacttatgagcttgaagctttaagagaatattatttgccaatgtgtctaaattatttattgagaacagctaaattatgagtgtaagatagatacagcaatgcttgctatggtatgcagtacttggttcagtgagaggccataattactgacttttaggaagctgtagattaattagttgaaatgaggccaaataatcagtaatcaaagccaatatacaaatgattaaacctatctgtctgcaggcaaagattcttaagttggatagagagaacagctatactctctttaactgtttacaaggaacaacccaattaaggataatagcatgggaagattaagagaaaatagatgaaattgacataatacatcatataaatatcattcaaatgaaagctggtgacactattaatatcggacaaaatatactttaaaagcaaaaatattattacagataaagagttattatttaatgataaaagaacaattcaccaggaagagttaatcctgagcctacattacctagtagcatccttttaaaaatatagaaagtaaaaattgacacagtcaccaagaagtattgaaaacccatataatcataatctgagagttttaaccatttttctctcagacactgataaatcaaacaagctaagaagcttagaaaagataaagaatatttaaaccacataaccggttagcttggacaaatagacatatatagaacttcaaactccactaacagataatatacacacatagaaagtcttaatgctgatgaataaaaattatatttactaattctttatttcagaggaaaaaagcaggagattagaaactgatacttttcaaaactttatacatttggaaactcaaaactgtacctgtcaataatttgtgagtcaaagaaaaatgatgatagaaattagtacatactttaagtcttgtgggacacaaagaggtatatagagggaaatttatagactcataaatgtatacgttagaaacggaaggagacattgttagggaattaaggattcaattaaaaaggtataaataaaatagcagagtaaacccaaatacagtagagggaaggaataatacaaaaatattaccaaaaatgaaatagaatacaaagaaacagtagagaagatcaaccgagcaaaaaatgattattttaaagactaaaacagcacattctcacttgtcaaacttgatcaactacaaagagagaagaacaaagagagagagagagagagaaatacaaacagtattagaaatgaaaaatgggagctaaatatagagacaattgaaaatagaaggtcaaaagaatataccatgaataacttctttatggccatactcttgaaaatataccttctaattaacagggataccctatgtatatatatctatgatatacacattgtaagctagtgtcatgactagagattgagaaacataatgaccaggttaagtctggcttctgagaatgaaaattcattcattcactcaattaatatttgtggatacctactgtatacttttaattatgctggtgctaacatatttttatgaatgagagagacattaaacaaatcagtaaaaaaaataactacttcagcctggccaacatggtgaaaccttgtctctactaaaaaatacaaaaattagccaggcatggcggtgggcacctataatccagctactcgggaggctgaggcaggagaattgcctgaacccaggaggtggaggttgcagcgagccaattgtgccattgtaccagcctgggcgacagtgcaagactccatctcaaaaacaacaacaacaacagaaactatttacaattttggtaagtgcagtataggaaaagtgagagtgtttgacagggaacctaattttaccagggcaaagggcagatcaacaaaggttacttgaagaagtgatatttaagctttgatctcaatgggtagaaattatccaggctagaaggtggaacagagtctaaatacagagcagaaagaaaatgatatatcaaagcagtgtggtatgaaggacgaataggggatcagagggtgcaaacgtagaaaggtgtgtgattcggtttcagtggttgccatggaatatggtcaggatttgtatgagctaaacgcattaaattcatatatctcagcaatgtgcaaacaaattttctctttgctttatttaaatcctaagaacatagtcagtagaaaaagtataaaaacatggataggaaagaaagaaaccaatatcattcagaatagtgattgcttctagagaagggagagcagaggggacctccgtatccatcccttataaatgcaaattcctttcctgaaaggatgtataaagttagctgcaatcatgagtttgttaatttctttgttaagtgttggacttatctggaatggagccctcaatttaaaacacagagtagaaaattatagaagagaaatgaaggtgccatttttaagggagcagtagtttagacagtactactcaaagtgttgtatgtggaccagttcatgaagagggaggtgcagagtttgggagtaatggtttaaaatggcactttcccacacaacagccactagctacatgtgactgttgagtacttgaaatgtggccagtctgaatggggacatgctgtaagtggaatatacatgctggattttgatgacttaatttttttaaaaagttaaatatctccattatatttgtatactgattacatattgaaataaggttgtggatctattggactacataaaatattattaaaattaatttcaactgtttctttttacatttttaatgtggctactagaaagcttaaaatcagacatgtggctcctatgatatttctgttggacagtgctggtttagagactgtcatagcagtttgacactaccactaaatccaagtgcaatttttattgtattttataaaagtatcaccaacccacaacatattggagtgaaaaatatagtcaactagttttacatcctaaatagtttgtgaagcactgctttaaaccattcataacttccagagcattttaaccactatgcttattataggaaaatatgtatactgtaaggtcaatttttcagaacactatgaaatattctaagaacctgactattaaattgatttggctctctgtgtatgaaaaaagtgattgataaagatgtcatcatataaccctcagacattatcatataaccctcattgtatttattttcagttacataacttgtatattggattcggaaagaatataataaaaactatagtacagaacccatttttaaaaaatccagttggaggaccagtttgatatccactagttcttattttgagaattaaaaaacttggggtacagaagctcatatctcagattaattacattgcagctttgaaaatacacttaagtaattgtcttctttagattttgttctataaaattgacttatttttcttcagaataggctagttaacattggacttagagtttggcacacgtgagcttgtgatttacagggcaatttttctcatcaaaacctgggcagaaccatttattttaaaaccaatatttattttacaatgggaagatggagcagattaaaggagcataaaactatgataaatcacccagtctttatcccgtagaaattcttttaaatggctctttaagtaatagcagtaaaaccgtttcatagagtttgtttggatggttttttagcatatggtatagtcatgtagattaaaatctaattaatgaagcctttataataattcagacatggtctgtgtgattccttttcaataaaaagtacaatatgatttttcttagctacgtttctgagtcttgatcatgattaaaaatggaaaccagtctaaaattcttagctgtttcaaatcaaagacccagaagttaaatttcttttaatgtttctaaaattaattattaaatagtaaccaatttttacatgaaatatttaagaacatgtatatctatgtgtattatagattattatgcaattgttgaagaaaggaatttttacaacttattttgttttatttggttcgcatttatgtcttcggttataataatttctgtagtaaaaataatggagctacatttttctaatagtattctttaatactattctaatgatagtgaagttatatcacatagagcatttggaccaattaaaaatactaatgggaataaaatattttaaatgcagatctgcttgtagtcacggtgaattttttaaaaataggaagtctgtgtcctattgttgaatggatgtctggattctgtatctagttaattatggattctaggtcagggttggcaacctttttctgtaaaggactaaagggtaaatattgcaggttttttggtagtatggtcacaactactcaactctgctgttaatgatgagagcaaccttagacagtatatgcatgaatgggtgtgtgtgcaaatcctttaaccaagcacttctatgtctgtgaatattccctaaggaaataatgagaagttttggtaaacaagtgcgtgcaagagaatcaattatggtattaccgagtaacatggaaaactgtatatgagccctagttaattcaaagaaaagcaacaaagtagaagttaaggtgtcatttgactttaatgtaatgtgcgtatgtatatgagattggaccatgtagaattgcacctaattgactgctttttatctgcaaaatgataattttatatggacaacctaagatgtatacatagaaacagactgaaagattatccacctatagttttctgggcggaagaaatagaataacttttacccttttccgtatgttcattatttacaatgaacatattttaacctgcaatgagaaaaatgatgcagggtttttagaacgaaagaaaggctttcccattcaaattatgtttctcaatgataaaaatacacaaagaatacacatgtagctctctttggaggggacgggacctcctgtgagaaacttggagaattgtttttctattggcaaggccatttctgttacggcaatggatgtagagagctgcagccaagggacattgggtattctttcccattggtgactccatctcccctgacgctgtttaacattcagttcatcagatgaactcctcttgttcagattccttacatgtcagattgctgcctgattaggatttggttttgcagggaagacatttacaggaagggaatgaatgtattggtctttctgacatctgtgcaacagctatactgcaaatcgtagactactactttgacattctggttttatatgttggtctcatgagtgtgtttaatgaagtccatctcatgagaaatggattccatactgtgtgttgagaaaaccaaggccaagggggctgaagcctggtataggggaccatgtaaagtgtggatgactttcagctgggcttctggggagaaagcctgctgcccttcctcatacagcattctacatagcacaacacagtaggaagcttaagtcttttcctatttggactctgcccctttccaactctcaagttctgcaattctttgacttttctgtcttcagcccttgcttcctctgcttttctcactgcttttgtcacctagcagaaacagtggtgagagactgctacacaagagacattgtttgctgctggtatttaactttctcctggagttttctgtggatgacattgatttatggtgcaaagggccctctgctttggagctgacctgtagagaaacagagtccctcaggccttctgtgaggctgggacccccttgttccagcgacagggattggtatttatgtgagactgtgggatatccccctagagccagctgattcctgcagtgacaatgtgaagaaaagtagcagagggccgggcgtggtggctcacccctgtaatcccagcactttgggaggctaaggcaggcggatcacaaggtcaggagttgaagaccagcctgaacaatgtggtgaaaccccatctctactaaaaatacaaaaatgagctgggcatgatggcgtgcacctgtaatcccagctactcaggaggctgaggcaggagaattgcttgaacctaggaggtggaggttgcagtgagcggagacctcaccattgcactccagcctgggtgacagggtgagactccatctcaaaaaaaaaaaaaaaagaaaagaaaagaaaaaagaaaaaaaaaaagcagtagaccacttctgcacctgagagaggcagacattttgtgagctcacatatttttctcatcagactctgaaacagcatttcactgtattttgatacaaatgttcaaactacacattaggggtaatttctgcctcatttggagcacgaatctaaatgattgtatctccattagagaaaatgaagagccctctgtgtctgatactacttcgttaaagagaaaatattctcctagtaggcaaaagttactgaccaaatacagccccaaatcaaagatcattcctactaagaactcttacattagcttcctttttcatgaattaacgtgggtctgtggaatctacatttctttgaaatatttgcacattttcccttttcagcagatgagagaaaatcttcattgaagacacattcctttgtcactctgggggctgataggggatgagagtctttgtatttcaagacatctaacctgcttacagaatttgaggttatacatcttgagtaagctttaggtctgaaaattgagacttcagctcacaaagtgttgattacatccctttgcttagcaatacagtttagtcatttgtaaaaagtcaactgaatacaatttggcctcatcaatgaaatgtatcaagaaccataaagtagtagaatgatgttaagaaaaataacctttcctttttttctttgctttctttgtattaaaaaatgaaaattatcctcttttccctttgagttcatgctaccaaagtttacagattttattttcaatgtttaaatgtttatgcaaggggagttcaatttacaaatctaaatgctaccaacacaacagttaattttagaaaattgtcagtcaccagacacactagctctagaagaagaggattcattttctacataggcaataatgtatgttataaaaaatcaaaagatagtcacatggaaaggggaaaaatgaatgtagatcaataatttaactctgacctaagttctataacatggctcataatttttcaatgaatagacccttaacattttacatatagagcttcagttttgtattgatctgccctaatgtattcgtcatttcacagaaggaatagcatatctcaaatctttaacaaacacacattgtgtcggcctgcaaatgttagccaaaatatgacaacatgttgttatttactctgttttcagaactactttttttctggctaaataattttttaaaattggaagagaaatggatagtaaatgaatgatgacttggagggcaagttcatggagctctttcttagttaatagattcctagtctttctgcattacttaattgcgtattaaaagtggaacccttgatgtaccatgtacagcatatatttattctgtagaaaattattaatttttaatggactaagtggctgtttggacaagggaccctgactattaatcaggaggtgagtgattgactgactttcatgttcattaattattcaaggaagttcacctacaagggccacaacagaaaaaagtttctgtcagtatgcacattttagtaccatattcatttactcacttaacaaatatttaatatgtgccacgcattgatgattcagtgatgagcaagaccatcagcctctgtcctcaggaagctgtcagggcagtgcataaagcagaagtgtgtccatgtgcgaagagaaggagaatgctaccgagcagtttagaagactcagttttgcttgactcccctctctatttaggaagtgattattctctgtacatatttcctaagtctcctggaaattcaacctagccaattctaattcttatctgagaaaatattttgtttggaatgatagggtcacagtttcttagagtcagaagagacttgagaagttatcgacggatgcacccttgtcttccctgcctcagccgggacacatccaatgcccagaagagagcaggctcatgtgtggggccatttctgtgtggattgtttgaaactttttccaaataatgaactgcagcttatttccctgcgtattctctttaatgattccagtcctgtatcctggataaaataataatatctcatttacctcttatttggaacacatgtcataattgtccatttatttgtgtgatttttgtatcattactctgttttcccttttaaacatgtgtacctcgagagtggaattgtgtctgtttttggtcattgttatttctctagtgttatcacagtgctagggaatgaataaatgaatggatgagaatgatttatcttgttccaaaaggttttaaggaagaatacatggatttaaacctacataatagttaattaactatttgacaataactgtaatggttctttcactactccaatttttctgacactcagattaagatttttttgtaaattttcttcacatgtaatattgagttcagcttttatggtgtccatctgtctctcaatgcatctcacatatttttttaaagtgcctctctcactaggaggtttggggaaggcttcacagaagaggtgaaaattggccttgtgctggatcttgaagaatgagaaagcattctccatgaaaatggagccaggaggggcactttccggggtgcagtgttatgaacatgtttactcatctggcatttgttacctcagccctttgtgcttccctattctttggagatttttgactcattttttcccatcttcttcaggaacttgactattctttcccctttcccacttcaacattgcctcaaagctggaggcagagattcttgtgatttagaatttgcattagggcattagacagtctgggttcaacccatttgttacatgtacttaagcaaggtaggatactcctttgagatttagcattctcctctttaaaatggagaaaataatagctacctcataaagtacttttgagaattatcatatacgttacatgtgatgtgcttgagacacagtagagacctaacacactgtaactgtcatccttgcctgcactctagaaagccactgctgtagctcactctggtggtataaccatctgtccagcggcctcaggacatgcagtggctcagacatattttttcatggaaacctcatcaatggctaatagatgtaaagctatttcagctttttccaggtccttagtttagtggttttatatttctgtccttgttctttccaatttccaggtgcatgggatccagttattttttcttttctttttttcttttttttgatagggctgtacaggaatcagaattgacacattcgcccatgaatttccctcttttcaggtctccatttctcctggtactgcaaaagcctagatttctctgatctcacctctcccagcctcatctgggtaaccaacgtacttatttcattctggtcaagattcctctcaataggtttattgcagattgctgcagctgcaatcagtgtttacaatctgatgacaagttggagattaaggcttgtcatcactatttaattaacctcaaattaagcagtttctggccccattccatgcccttccacaagccattcagagctgctaaaacagtggtgtgaggcctgatagattccgggtcacaccactggagagtgggagctggctcagcagccactctgaagaaaatcaacatttgattcttactcttatgcctgagggctgaagataggtagctatccaaagaaaatgtaaagggaggggaagaaaggagggcacctttctatactagtaagtgtgtagtctgtgaattgcaaaggacatgagccaaaaagtgttccagagacagaagaaaaaagccttgctcttagtgtttaaaaataatttgtttttctaattgcagaggtgacatgcatcagtagtaaatggtaatggtaaaaaaggagaaaaataataagaaagtgaagaacattcaacttcctactctacacacccgcttttgaggcttacctgagctgtccaatctggtagtcactatcctcatgtggctcttgagcttttaaaatgtagcaagactgagttgacatgtgctctgagtgtcaactacacaccggagttctaagacttcatatgcaaaagaagaattcaatatatcacattattaatttctgttgcttacatgattaaatattattttgcatatgttggactaaaatatatcactaaatgaatttcactggtttcttttaactttttaaaacgtaactactgacactaaaattacttatgtgccttgtactgtatttctattggatggtctcttttggaccattttctccccatgtatacaaaatttttacaaagaaaaactgagttattctacacacaactttgtatcttcccttttgaagttaatatattgagaatatgttcatgtcatgaaatataagttatggtattatttttaatcatttataatttttcattttatgaatgtcccttcattgattaatcaagtcctcttagataactaccattttttaaaaaattacaaattctccacgagcatacttataactgtatctttgggttcatcttcaattatgctcctagggtttgtttctggaagccagtttgctgagtcacagacttgcttgtggtgtgactggctacaagggaagggtgagtggttggttgtgggtagatgaaagggaagctagagaggaggaggtaccaactgctaggggctaccctcctttctccagcagaaagtggatgacaccaaaactgagaggttggaagagagtttaatgaacagaagattgacagaggtgtgggtagatttaagggaaccaaaaaagatggtgaagcaactatggaaagtctgaaggagcaaagacagagaacagaattacaagaatccaatgagagccctagctaggaactagggaaaaagggccactgacagaaattatagtcaaagctagaaaaatgtgggcacttgtcaaaagtctcagttgtgcagtgtgaggggaggagagaggaaatggggaatagatacccccagactctttcctccaattctctgatcccttaatgctgcctgccattgtcttagccctatagaaaccaaagggcacgggagatgagtctgtagagatcagtaaggaagagaccaccagcagggcagagaagggtggagaagagataggaagaggtgggtggagaagagataggaagaggtgagtggaggaaaatcagaacaccagcttggatacttaaactgtaggataaggcacttatcctgtgtgagctttgctttcctgacctgtaaaatgtgcatagtaatacctacctcagaatgtgatcgtgagaataaatgaaggagagcacttagcacaatggttttttatttacttgttcttcatcagaggcttatcagtggaccatatcaacttcttaccatgttgtccatttatcatgtctaacaagttcatcaagagggaaagtagcagaaaaacttaccctggcagactgggaccttatatttagacttgaaaagttctctacaccctagtgaggtagccgttagtgttctgaattgtgcatatcacacccttgtgctctggtaaaaatccacagaatttttcacatagttggataattaggacacatgctgttggctctgctcaaaaatggtcatttaagtgtccttttattatttctagcatccactgggaaatttaaatagctactgccggtgttctttatatatgctctttaaaaaatgctgaaattgaacagtttaataaaattgctggactgtcagcttcaccaagctctcccagagataaacctgaaaaaacaaactccataccctaaagtaaatacttctgtaaatcagggacttttacaggtgctccctggggagtgtagtttgactaatatggagtttcgtttacaaacaggggtggaagccggaagcttctgaggcgatttgaccgcttcattttcctttgcttaacacagatctgtactaaaaacaggcggcagcatttggaattaggggcctccgaaatgtcatctctctaattcttaagtagaaaaatgagttgcacatagtgtaaaataaatgaatatattttaaatacatgaatacgtaaatatgtgaatatgttttatttttattatttttttaaattatactgtaagttttagggtacatgtgcacaacgtgcaggtttgttacatatgtatacatgtgccatgttggtgtgctgcacccattaactcatcatttagcattaggtatatctcctaacgctatccctccccactccccccaccccacaacaggccccggtgtttgatgttccccttcctgtgtccatgtgttctcattgttcaattcccagctatgagtgacaacatgcagtgtttggttttttctccttgcgatagtttgctgagaatgatggtttccagcttcatccatgtccctacaaaggacatgaactcatcaatttttatggctgcatagtattccatggtgtatatgtgccacattttcttaatccagtctatcattgttggacatttgggtcggttccaagtctttgctattgtaaatagtgccgcaataaacacacgtgtgcatgtgtctttatagcagcatgattcataatctttgggtatatacccagtaatgggatggctgggtcaaatggtatttctagttctagatccttgaggaatcaccacactgacttccacaatggttgaactagtttacagtcccaccaacagtgtaaaagtgttcctatttctccacatcctctccagcacctgttgtttcctgactttttaatgatcgccattctaactggtgtgagatggtatctcattgtggttttgatttgcatgtctctgatggccagtgatgatcagcattttttcatgtgtcttttggcttcataaatgtcttcctttgagaagtgtctgttcatatccttcacccactttttgatggggttgtttgttttttcttgtaaatctgtttgattctttgtagattctggatattagtcctttgtcagatgagtagattgcaaaaattttctcccattctgtaggttgcctgttcactctgatggtagtttcttttgctgtgcaaaagctctttattttaattagatcccatttgtcaattttgtcttttgttaccattgcttttggtgttttagacatgaagtccttgcccatgcctatgtcctaaatggtattgcctaggttttcttctagggtttttatggttttaggtctaacatttaagtctttaatccatcttgaattaatttttgtataaggtataaggaagggatccagtttcagctttctacatatggctagccaggtttccccagcaccatttattaaatagggaatcctttccccactgcttgtttttctcaggtttgtcaaagatcagatagttgtagatatgcggcattatttctgagggctctgttctgttccattggtcaatatctctgttttggtaccagtaccatgctgttttgattactgtagccttgtgtagtatagtttgaagtcaggtagcatgatgcctccagctttgttcttttggcttaggattgacttggcaatgcaggctcttttttggttccatgtgaactttaaggtagttttttccaattctgtgaaggaagtcattggtagcttgatggggatggcgttgaatctataaattgccttgggcagtatggccattttcacaatattgattcttcctacccatgagcatggaatgttcttccatttgtttgtatcgtcttttatttcattaagtagtggtttgtagttctccttgaagaggtccttcacatcccttgtaagttggattcctaggtattttattctctttgaagcaattgtgaatgggagttcactcatgatttggctctctgtttgtcttttattggtatataagaatgcttgtgatttttgcacattgattttgtatcctgagactttgctgaagttgcctatcagcttaaggagattttgggctgagatgatggggttttctagatacacaatcatgtcatctgcgaacagggacaattggatttcctcttttcctaattgaatgccctttacttccttctcctgcctaattgccctggccataacttccaacactatgttgaataggagtggtgagagagggcatccctgtcttgtgccagttttcaaagggagtgcttccagtttttgcccattcagtatgatattggctgtgggtttgtcatagatagctcttattattttgagatatgtcccatcaatacctcatttattgagagtttttagcatgaagggttgaattttgtcaaaggtcttttctgcatctattgagataatcatgtggttttgtcgttggttctgtttatatgttggattacgtttattgatttgcgtatgttgaaccagccttgcatcccaggaatgaagccaacttgatcatggtggataagctttttgatgtgctgctggattcggtttgccagtattttattgaggatttctgcatcgatgttcatcagggatattggtctaaaattgtctttttttgttgtgtctctgccaggctttggtatcaggatgatgctggcctcataaaatgagttagggaggattccctctttttctattgattggaatagtttcagaaggaatggtaccagctcctccttgcacttctggtagaattcggctgtgaatccatctggtcctggatttttttggttggtaagctattaattgttgcctcaatttcagagcctgttattggtctattcagagattcaacttcttcctggtttagtcttgggagggtgtatgtgtcgaggaatttatccatttcttctagattttcttttttttttttagcatttaaaaataggatttatttatttatttatttatttagagacagagtctccatctgtcacctaggctggagtgcagtagcacaatcatggcttgctgcagcctctgcctcccaggctcaagtgatcttctagcctcagcctcctgagtagctgggaccccaaggcatactccaccatgcctggctaattttcgcactttttttttcttttttttttttaaagttctttcatacactttatttgaacttttcttttttttttttttaatttttttagtatttgttgatcattcttgggtgtttctcagagagggggatttcgcagggtcataggacaatagtggagagaaggtcagcagataaacatgtgaacaaaggtctctggttttcctaggcagaggaccctgtggccttctgcagtgtttgtgtccctgggtacttgagattagggagtggtgatgactcttaacgagcatactgccttcaagcatctgtttaataaagcacatcttgcacttcccttaatccatttaaccctgagttgacacagcacatgtttcagagagcactgggttgggagtaatgttatagattaacagcatcccaaggcagaagaatttttcttagtacaaaacgaaatggagtctcctatgtctacttctttctacacagacacagtaacaatctgatctctctttcttttccccacatttcccccttttctattcagcaaaaccgccatcatcgtcatggcctgttctcaatgagctggtgggtacacctcccagatggattggcggccgggcagaggggctcctcacctcccaggcggggcggctgccgggtgggggcacgcccacctcacagacggggcggctgccgggcgggggtgctccccacctcccagacggggtggcggccaggcagagacactcctcacctcccagacagggcggccgggcagaggcgctcctcacatcccagacggggcggccgggcagaggcgctccccacatcccagatgatgggcggccaggcagagacgctcctcacttcctacacggggtgaaggccaggaagaggtgctcctcacttcccagactgggtggccaggcagaggggctcctcacatcccagatgattggcggctgggcagagatgctcctcacttcctagacagggtggcggcggggcagaggctgcaatctcagcactttgggaggccaaggcaggcggctgggaggtggaggttcacgccactgcactccagcctgggcaacattgagcactgagtgagcgagactctgtctgcaatcccggcacctcgggaggccgaggcgggcagatcactggaggtcaggagctggagaccagcccggccaacacggcgaaaccccgtctccaccaaaaaatacaaaaaccagtcaggcttagcagcgcacgcctgcaatcccaggcactcggcaggctgaggcaggagaatcaggcagggaggttgcagtgagccgagatcgtggcagtacagtccagcctcggcaacagagggagaccgtggaaagtgggagacggagacgagggaggggggcaccgtggaaagcgggagacggagatgaaagggagagggagagggagctagattttgtagtttatttgcatagaggtgtttttagtattctgtgatggtagtttgtatttctgtgggatcagtggtgatatcccctttatcattttttattgcgtctatttgattcttctctctcttcttctttattagtcttgctagcagtctatcaattttgttgatcttttcaaaaaaccagctcctggattcattgattttttgaagggttttttgtgtctctatctccttcagttctgctctgatgttagttattgcttgccttctgctagcttttgaatgtttgctcttgcttctctagttcttttaattgtgatgttagagtgtcaattttagatctttcctgatttctcttgtgggcatttagtgctataaatttccctctacacactgctttgaatgtgtcccacagattctggtatgttgtgtctttgttctcattggtttcaaagaacgtctttatttctgtcttcatttcgcgacgtacccagtagtcattcaggagcaggttgttcagtttccatgtagttgtgtggtttcgagtgagtttcttaatcctgagttctagtttgattgcactgtgatctgagagatagtttgttataatttctgttattttacatttgctgaggagtgctttacttccaactatgtagtcaattttggaataggtgtggtgtggtgctgaaaagaatgtatattctgttgatttggggtggagagttctgtagatgtctgttaggtccacttggtgcagagctgagttcaattcctggatatccttgttaactttctgtctcgttgatctgtctaatgttgacagtgggttgttaaagtctcccattattattgtgtgggagtctaagtctctttgtaggtctctaaggacttgctttatgaatctgggtgctcctgtattgggtgcatatatatttagggtagttagcttttcttgttgaattgatccctttaccattatgtaatggccttctttgtctcttttgatctttgttggtttaaagtctgtttatcagagactaggattgcaacccctgctttttttgttttccatttgcttggtagatcttcttccatccatttattttgagcctatgtgtgtctctgcatgtgagatgggtctgaatacagcacactgatgggtcttgactctttatccaatttgccagtctgtgtcttttaattggagcatttagcccatttacatttaaggttaatattgttatgtgtgaatttgatcctgtcattatgatgttagctggttattttgctcattagttgatgcagtttcttcctagcctcgatgggctttacaatttggtatatttctgcagtggctggtaccagttgttcctttccatgtttagtgcttccttcaggagctcttgtaaggcaggcctggtggtgacaaaatctctcagcatttgcttgtctgttaagtattttatttctccttcacttatgaagcttagtttggctagatatgaaattctgggttgaaaattcttttctttaagaatgttgaatattggcctccactctcttctggcttctagggtttctgctgagagatctgctgttagtctgaatgggcttccctttgtgggtaacccgacctttctctctggctgccattaacattttttccttcatttcaactttgttgaatctgacaattatgtgtcttggagttgctcttctcgaggagtatctttgtggtgttctctgtatttcctgaatttgaatgttggccgtccttgctagattggggaagttctcctggataatatcttgcagagtgttttgcaagttggttccattctccctgtcactttcaggtacatcagtcagatgtagatttggtcttttcacatagtcccatatttcttgtaggctttgttcatttctttttattcttttttctctaaacttcccttcttgcttcatttcattcatttgatcttccatcactgataccctttcttccagttgatcgaatcggctactgagacttgtgtattcgtcacgtagttctggtgccgtggttttcagctccatcaggtcctttaaggacttctctgcattggttattctagttagccattcgtctaatttttttttcaaggttttttacttctttgccatgggttcaaacttcctcctttaggtcggagtagtttgatcgtctgaagccttcttctctcaactcgtcaaagtcattctccgtccagctttgttccgttgcttgtgaggagctgcgttcctttcgaggaggagaggcgctctgatttttagagtttccagtttttctgctctgttttttccccatctttgtggttttatctacctttggtctttgatgatggtgacgtacagatggggttttggtgtggatgtcctttctgtttgttagttttccttctaacagtcaggactctcagctgcaggtctgttagagtttgctgcaggcccactctagaccctgtttgcctgtgtttcaccagcagaggctgcagaacagcggatattggtgaacagcaaatgttcctgactgattgttcctctggaagttttgtctcagaagagtacccggccgtgtgaggtgtcagtctgcccctactggggggtgcctgccagttaggctactcgggggtcagggacccacttgaggaggcattttgtccgttcttagatctcaagctgcatgctgggagaatcactactctcttcaaagctgtcagacagggacatttaagtctgcagaggtttttgctgccttttgtttgtctatgccctgcccccagaggtggagtctacagaggcaggcaggcctccttgagctgtggtgggctccaccgagttcgagcttccaggccgctttgtttacctactcaagcctcggcaatggcaggggcccctccccaagcctcgctgccgccttacactttgatctcaggctgctttcctagcaatgagggaggctccatgggcgtaggaccctcctagccaggtgcaggatataatctcctgatgtgccgtttgctaagaccattggaaaagcacagtattagggtgggagtgacccgattttccaggtgccgtctgtcacccctttctttgactaggaaagggaattctctgaccccttgtgcttctcgggtgagatgatgccttgccctgctttggctcatgctcagtgtgctgcacccactatcctgcacccactgtccgacactcctcagtgagatgaacctggtacctcagttggaaatgcagaaatcacccgtcttctgcattgcttactctgggagctgtagactggagctgttcctattcggccatcttggctccacctcgtgaatatgttttaaatacataattaccagactcttttaggaagtataattattgaatgaataaggtatcaattaggaggaccagcttgcatttacttaatctttacaaggttctggtcactatttaaaatgctttgtgtacattatctcatttcatcctcacagtagccctgtgaatgaatagtgttttcttcatattacctacagggaaatggaggctctgagaaatgaagaaaaatggttatggcagtgtcatgtttagcaagtagcagaggcagggatgaaacacacacaacatttgactccagagtctgaacccttaaccaccattctatgtcatttcttccctaaacgtttgtggagaaacttgagaaattttgtaaaaaaatgacaacttaggtaaacccatgtgggataattaggcacagtttttattcccataaaccacttgcagattgtagacatgttccttggtttcttactaaaaagcaccatctaagtgaatcccaatattaaatctaccacactagttgagctgagctaaaggagttttatggccaatgaagcaagatgtttactgcgtatttgcttaacattaatgattttttatttttaatgatcaagtgttattcaaagtttaacttatactagttataccacatgctgaaaggcatctctaattgtacatgtattgactgtgagaggatgcaaagtaggattccacaattttaattaactgttcctcctctgacatttcattactggttctggaagtggtagtagatggcagacagttaactgtcagaatttttctttaaagaaggtaagatggagaaatgttagtgttgtcttggtgattggagaggaaagcagggaagggagagaaatggctgatagcttaacatgttgataacatggttgagtaaacaaggcttccagcatttgtaggtaaattttaaaaatttgagcagatagacaaaaatggaaataaaaaataaagaaatcactaacttcaacttttgcaacttttatattgcaaaggcaatttctttctcctgaaggtgggtacctcctagacatcatatatctttacccaaaagagtttttgaggattttctgtgagtcccaaggggcacaaatgtgaaggtcaaagataatgggtccccatctgacactgggctgatttgccaagcacccaggatgcatttttatttctttttcatggtaaaagccagagagaacactgtagagtttaaacacggtttctttatctggtgcccgcatggggagatgaaggtaaagaggccaatttatccagcaaatgtgcccaagcaagtcgggaataattacctcccttgacatctgacaaaactttgctgcatccccacaaaaattctataggcagtccttccaagtcattttcagagaccccaccatggcaggtgagcttatttatttatttctattttgagagatccacctttctagactctcttttaaggtttgcctcctgtgtaatgaatggagatcagtgggtatttcattaccaggtatctccctgctgcaggcagtgcctggagaagtttctctctgtttagctttcaagcctcatttattttctcatgctttctactgtgggcagagcctggccgactacattattaaattactattattacactgtgatgtcttggcatgatcaggggctaagttggaaaagatagtgttgggcagggaacatgtcttgccccttccctaagctgccccagatggaccttggctggcttgttgggtctgtttcagcagcggaattctctgaagacaaagggaaggtctgatcatatttgaagcagtttttctagtaagtgtaaggaatgaacatttcacttttaagtaagtggcttttgatttaagatcaactggataattcatggtggtcatgtttttggggagaggggatggcatttcatattcaaaggatttgacattttaaaagttataatgttatttaaaaagctataatatcatgaatatatttacatgtagttcatttatgtttacacaagctttcaaaggctgtctattctcagcagagaagttttaattaaaagtattttattgccattcgaaccctccttaagtgaaggcactgttcttcacttctctgtttttctttctcatgcactcttgataatcaacccagccttatttacaataaaaaagttattgctattatattttaagtgatttctcatacaccaccatgtcaccaaagctatacaataccagcatatagtcagtgctcagtaaattcttgtgaaaggagtggttcaatacggcccatgcattttatggttcagccataccgaaaaatgttttagcaaagacactgcctggtccacctttggaattttacccaccactcagaagtgtcgtttgcctttcaagtcttagcactttttagactgcttatttgtgagttttctcctccgtcccctatctatgcacagttccggtgtatgcattaggtgcttaataaatatcttacggaatgagtgagttaccaaatgaacctatacttatacagttagccctcagagaaatcgtctgcggcagtttacaatttttgtaaacaataaaataataaaaatgaaatttgaaacattatttttcttgttcagtccttaactcaaaactctctaatgcctccctgttctctttagtagtggttttctaatgatgataatccgatcatgggatcatgcctttttcctgcttgaaagtctttcaaaggcttctcattacccttgggataaatgtaatttaaattctttaaacatgactgaaaaggttctaccgctccagctgcagttctccccacgccttgtttactcttccacatgttgatcgtggaatatgttgaatccaggaggtttcctcttccccaggtccttggcatgttgggtttcctctgcttggggcacttttcacctcacttagttaactccttttatgtttcagttggtcttattttaaatattaccttctgaaggaggcctttactgtctattccctgccactaccactgatcaccaccactataaccccacctgcctctaccgatctagactattttccttctttgtatgcctttgaagtattttatcaatgaaatggaatagttgaataatatgggatgttttggacaactcatatgaaatactaagctaatgcaatttaaattgataatttctgcaatcttaagcttttctctcataaatttctcttcactattttggcagctcacatgaccctcccccattttcccaaagcatgcatatttattataggcaaatgctgtgctaagtgctttacatacatttattcatttgcttctcacaccagccttatagtggatactgttattatctcccattttattgaaaaaattaaattcattgagcttaagaaactcacatagaagtgaatggcaagctgaggtttaagtccatgctatatgcactctttttttttttttttgagacggagtctcgctctgtcgcccaggctggagtgcagtggtgcaatctcggctcgctgcaacctctgtctccctggttcaagcgactctcctccctcagcctcctgagtagctgggactacaggcacatgccaccacacctagctaagttttgtatttttagtagagatggggtttcaccatgttggccaggatggtctcgatctcctgaccttgtgatctacctatctcggcctcccaaagtgctgggattacaagcatgagccactgcgcctggcctatgcactcttattccctataaaaaatatacagctcgtgattagacaggtaaagtattcgaagacctggtaagtatttgaaatatgtgaaaatagccttgtttgtatattggttatcttcaatttatcctttcctacccactctctgctttgctctttgcttgggcagttctctgtgaactctataagtaggctcccgccttgtccctgggtattgcattaatccttggtttctccacaccatgaatacactttctaagcatttctgcagattaccctatttgagtattttgtgagtcatctgtttcttgcccatatcataatagatatagacagctttaaaaaaaaaaaaaaactgtggttgtgattgtgcttttgtaattcacatatagtataaagttgtatttacttctttccactttgtgtttaagtttgtataatgaaatggtataatggaattgaagattgccatatttcttgctgtcttgaaaataagaagcatgccacactcaaatataacgcgtgtgttttcaaggaatttgaccttgttgcaaattgggaaaccacagtcctacagaatattttccagaatccttagcctgacatgaggccccctgcatcatcttgacaagagcttaactttcttctcttttccactgagccccctttgcttactttaaaggttgactctgctttgtgtctgggtaggtagtgacccagatatttagtccatgattgactgccattaaagcaactcccttttttttacccatagaagtttacatatgaataaaattatatgttattccataaataaaagcccttatcataaatagggagtaaaagtttaaagagaagtacaaaaaataaaaagtaaaataatgccattcagattggcaagtgttactaaggtgtttaacaattaatgctgaattaatactttttcattgcatgtattagaaagattaaaatcaaatggaaagagatataactttattattctttggtttgtcctgtcagtggaccatgtaacaccaaggttccatgctttgatgtttggggaacactggtataatctatgtgtctgcccctgctgtgctctcaccccaaatgccttcttcctcctggtttcctttcccagatcttctccagccttctttttgaaccattccttcaccctctcagcctacacaaatctctcctcctcagaactctctgacacttattgcctgccctactcatgttggcttttgatcattaactctttttagttgtcatttcagtagtttatatttcatgtcttgcctcccaaattatatgcaagtttttgtctctaaactatataacagatagacactgggacctatgtttctggaatttcttatctaataagagtttagtaaatgtttgctgagttgaatgaatttaaccaaagtcaggtagatgctgttttctcaactatgggtgtattagtcagttctcacactgctagtaaagactggctaatttataaagaaaaagaggtttaatggactcacagtttcacctggctggggaagcctcacaatcatggtgcaaggcaaaggaggagaaaggcatgccttacatggctgcaggcaagagagcttgcgcaggggaactcccatttataaaaccatcaaatattgtgaaacttaattactaccacgagaacagtatgggtggaagtgcccccatgattcaattatctccacctagccctgcctttgacatgtgggaattataagagttacaattcaagatgagatttaggtgggcacacaaccaaaccatatcaatgggtgtagttcacagtcatagtatgtttttctgtctggttgggatgcacttttttatctttgcttcttctcatcttcattgaagttacattctagtaggggatatacagaatgaacagatatacatctaactacatcatataatgtcgagtggagttaaatgatataaggaaagtaaatctgcatgcatttgataaagagttttgggttattttttagatagggtggtcaaataatcctttgtgatgaggtgacatttgaggacatacctgaataaagtgaaggaggaaaaacatctgaatatttgggggtctagccttttagctggaagcagcaagacctgagggtctgagttgggaatgtgcttgatagaggccagtgtagggaggagaaagaagtggtagatggattccatatgtggccttgccagccatggcaaagattttagattttaattatgagcaaaaccagtagagggctgaaaagaaggaaatgatgcgatctgatttatattttttagaaaatcatttcagctgctgtgtaaagaagaggctgaaggggacaagaagagaggcaggtggccagtcagaaggctctggctgtgtgccagggaaggcaagcatggtttggagcctggtaatcttagcacacaaagtaggaagtagtaacagattagggataaattttgagggcagagcaactgtgtcattccttctaatttatttactactatccaatgctttcaaagtagtattctctgttggcatttattttcattttacaattctgttaagccttaagttttatttctatttacccaatattctttcatatacagttgtttttgagatggtgcttaatgactaattagccagtaaaaactagggttctatctggggcaagaatgtgttcccatggcaaatttatttatctgacttttcaaaagtaattgcatttttgtattcattcttgaacactgtttcaaaaatgttgtcatttccccaaatgactatttgggagatggatttttttatgcgattctaattctgtattctcttccttttaatactcccatctccactttatattacaaacttcatcagactactgcatgctattatagctgtcgtcaccatgggaagaaaatgactaattgaaactgcttattgatataatagagcaggttgtgacacttggcgagaatgctggaacgatgggttccagctgatgttatgtaaaaatattcagccatgaaatatgcacttgtggatggctttctgcagatgtctgcagaatgcagataatctgtcttctgagaaggtctgcaaattaaaggtctctctgaccagttagaattataccacagtgaggatggtgatgcagtgggtaatgaaatggccttgaatcttgggcaataatgattataactgcctatggttataagcaaaaatgggtgatttttaccccgactctttttaagagagaaaggatcagttggcagaaaaatgatgaacttttggttgttttggaattccttcaatgcaagatgtattggtatcatgaatagaagcatgaattgttatattgtctttggaaagctatttggctctaactatcaaaatagaatgcatatataccttttgacctagcagttccatttctagtaatttattttagaactatagtcatgcaggtgcacaaaattctatgtacaaaaatattcgccatggcattgcatttaacaacaaatgattaaaaacagcttaagtgtccaagcaataggagaatctgtaaataaattatggaatatctatactttataatctttgtaataaaattagaccatcacaaaaatgggtctatacagaaccatctctatgacatttttaagtgaaaaatgggttagaatatgccattatttgtagtcatggaaatttaaaatgtgtgtatatgttcacatatgcatatgttgaagagggtacagagatcattaacagcatgagtgggaagacatttttcaacgtactttggtgtggtttcaatttttcactttgtatgtatattatctatttaaaagctataaattaagacaattgtggatattatatctatgtatatttttactccctgatgtaaagatgtatttggttctttctgggctgtattgtacttgacttttgttttgacagtatttcttggtatggcatttataactttattttagaacacctaaaagtttcttttagaacaccttttatgaggatatcattgtgctgacacttctagtattgaggtggtgactccccttctttctttatttcttgtcatgactttatggaaatgtagttctaacactttcttccaatgcttctatccttcctgtccaggacagctatctgttcgaataaatggcaaaatcattcaaatccactggctattgaatatctaatgggtatatttatgaaaatgctcggaagcctctgaaattataggctcagttcttttcaacaacaaatagaagttaaatactagtaatactgcttattataaacttttaataagccctcttcttccccaacaaggtaaagagcaattttttgaactgtgtggccaaaagctgtgtcattccccacttttatatgtggtatcaggaggccctgagaacaatgtttaaaatgttttaatcattgttattgaaggaattaatgtatggtactattcagaaatcccattgctcatattaggtttctggtgtgagtaggggcaaagaagaaaaaaaagacatggaagaaaaatacactcctaaaaaagttaaataacaacttgtaaatttcattctctgttgttggaaaaccaagtcattatacatgaatctgtaaaaaaacaagtgttcggaacattgaggtgtatgaactatgtagtgtaatcagagcttattttcctgcagtggagattgaaatttatacgtttcttctaagcagcacctttcattccatttttattttctaagggagagtgaaatttacaaggctacttaacaataccaaaagtgttagttcctacacaatgaatagtgaagtttacaagttgccatttggcaatgcctacatttctgtttgtttgttcccccaccctctctacaaggtatagtaaaatttataaggttcataaaaacccttcattattaatacaaggttatattgctggtggggattccacaaatagcttatgaacatatctaaagggagaagtaaaggtggacgttatgaggcaggaaattctttcaggaacattgaattgataatcatcattgaagaacatgcagatactcattcatggccttgtgtccctatgaccccattcccttggctccttgattctgttgtatcctttgtgtgtatttcattggaccttttttttttttgaaaaccttactcattttcctatgcaagtcttactcactgcacaaccgtccttccatggccattctcctccccttccattctctcttctgaacactcaggatggttattgtgtgcacgattaattaaataaatggttcatggccttaggacatcatttctgttattatctggcactgctacttaaatattttattattacagtattttattgttattaaaatttcaagatatgtattccttattttaccaattgtattataacaagctccttgatgggagatatcatgtcttaaaattccttatgctcccaatgggacctcgcatatagttgtgtaattgaaatgaagtggctgtttgaccaatcaggagaacagagagatgaagaaagtgaaaagtaacagatactctgtggtagcttgtctgcaaaaactgttgctaacaaatccttccacactgtctgtgcagacctcttctcccgtcaagaaataaagtcttttttctccccttgacatttgtttgccttttgactcaattcgatcaacagaaaatggcagaaatgcacagtgccagttccagatttagactttaagatggctgacttcactgtcttggagcctggtgccatcacttaaagaagtctgatcatgctgcaggagagagaccactccatttggaaagaggtcctgaagaacaacaaagacatggagagaggcccagccagcccccaactgtcccagccaggtcagccaagggcatgtgaatgaagggaagccagcttgcatcttgcagtctgtgttgaactaccccagtcaacaccatatggagcagagatgagccgtctcactgagccctgccaatattgaagaagcaggacaaataaattgttgtttaaagtcactaacttttgggggtggtttattaagttgtaaagatcacagaaacacacccaaagtgggataagcagtacattaaattttgtggtccacagcagtgcttttcagactttaatatgcctacaaatcatctggagatcttattataattctggaatacagaaggtctagggtgagacctaagactcagcatttctatgaagtccccaggtgaaactgatgttctgttctgtggttcacagtttgagtagcatgggtgaaaacaggcaagcccatccattcaaagatttacaagttgcttattactatcaggcagattatacttgcctttttgttgaaatttcaaattctgtactggctcattcatctgtatattagatactcaagtctcaacactatagagtcaaacaaatatgtgttttgaccaaggtacttggctgggcaagtcgtgttttcttcaagtctagctttcctcagagtcattatatgcccttaggcatggtgtctgtttaaccaacatggatgctttgtggcaatcattaatcatggcaatgctttcacctacagagtgcttcattgtgaaacaggctctgcactaagctctttgtactaaatctatttccctctaccctcctaggttctccagctgtggccctctaaagtagagtgaaaaatgacagattaacataagaaaaaacagaagtttattaacatgtacttgcacatacacatggaagtacccagtgatgagtgactcaaaggggtgattaaaatgtgaccttatatagctttttaaaaaagagcaataaatttttagagaaatggtaagacaaaggaaaggactttgagtttctgcaaattgtgagaaggtaaatatatgggggaactaatggaagggctagttagtaaagcttgttacatagattcctctggtgtctcttctggctagtgaatatctagagttatctctgatgattaactttttctttcctgataggtggggagggcacctttataaatttatatcctgttttgtggcaaatagggggaagacagagagcttctctcatatctgcttcttctcaactgccttcagctcaaaataatcctcatgccaaagtggcatattttggggtggcatattctgccactcctcacctttatataacattttctcacttagtccctataataaccccatgggataactgacatcagtttgttgatgaataacctgggcctcagggaggttcagttaccaggttactcaatgagtaagccaggattcatttcccggtatgatcggattccacagtccaggctgataactgctgtgccacgtttacccccaccactgctcaatcaaaaacctagcacacatgagcttcaggccttcagattacatgtactgcagcttacattgtattctatttgtttgtttactagtttattcttattctagtagtagtagtatacatatttttcctccatgcagtataattgagttgggagatcctgacagaggtacctgaaatatgtgtgtgtacgtgtgtgtgtgtgtgtgtatgtgtgtgtgtgtgtaaggcagaggcggaaacacctttaaacccatgagatgggagatttaatttttttatagcaacattcacataattattgtcagcatcttacagtggtaaagtgctgatatgagaaaagtctttaccagaataaatatcggttattctttaaacctctatagtttcttgttttcattgtgtgttggctattgaaacaaaaataattttaccccctccctttgcttcagacttattgtttcattctctatggtatttgtcagacagaagctactactgttagaggttttcatcagagcagcataaaatacttcttttaaaaaccataaaaaagactctggtatgaggcctgtttgaaattagactgccaggacatctcttcacttgctggctttgaatgactcttctgtgttctcttgaaggttaaagaaactgacagtgctggaaatggcagtgcttggtggggccacaaccagtgctctgcagggaacccataccatgaatgatctgggtttaaaggaagataccaggatctctagccaggaggctttgtttagctctcaaatacctttactgtagacatgactgctcttctgaaatcacatgatgatgaaaatgatggtggtggtagtggtggtggaagggtgtgtgtgtgtgtgtgtgtgtgtgtgtgcatgcaaagaatttaaatggaactctcagtggcgaataagtattctatagaatgcagaaataaaaatccatgtttggtaaatgggtaacacacaaaagggtatcattaaatgcgactttttgtggtgccaacttaatccttattgtcctttatagccagttaaaggaaaaatatatttgaaaaatgtctggaggctgttccctgccggttccttataactagttacaaatatgatgttggaacttccttttaaaccacatactgaaatgcggacaaaaacaaaatgatagcttatgatagatactctgaaagtcaaaaacagcattggttctcattttttcctgccagcaagttacgagccatgactttatttctatctttaaaatctccggtttcttccctttgtaagtgggtaaaaccaaatttggattatcccaagataaaaagaaagggtgaatattggctcacataattgcaggtccagtggggtgacactggcttctgttatgggtggctatgtgtgccttattgtatcttcacaactgtctctcccaggggtgaatctaggattttgtggcccaaagctcatacagtttggagagccttctctataagaagattataaatgaccatatgaacacatcgctagagaaagacctgggccgggcatggtggctcatgcctgtaatcccagcactttgggaggccaaggccggcggatcatgaggtcaggagatggagtccatcctggctaacacggtgaaaccccgtctctgctaaaaaatacaaaaaattagccgggcgtggtggtgggcgcctgtagtcccagctactcgggaggctgaggcagaagaatggcatgaacctgggaggcggagcttgcagtgagccaagattgcgccactgcactccagcctaggcgacaaagcgagactccgtctgggaaaaaaaaaaaaaaaaagagagaaagacctgtaagcttaagatgtagtagcttcaggataaattcgcctctgctctcacccccctcacagtcctcctcttctccatgtggtcttcatcttttcttcagtcacagtctttgtggtgggggaagaaatatctctaagcagcttcagacttatgtgaatttaagtgcccaagatctcggaaagccttctctctaactgcagattcatacacttcccccagaagattttgattggttagattgagtcacattcctatctctggcggagagatggggcacctcaattgaaatcccaaaagaaccacaaagatttggggagagggtaaagggcgggacagtgcattaaaggaatcagaagatgagcattcaaaataataggtgttcatttctatgcttctcacctactcttatagatctaggaggggtgtgttctaaattaggtatatgaaacaccttttcaaacttgaattttcaggtcttttcagggagcaagccaaccttggtaagagcaaagaccatatactgaggcaggctgggaggtcaatttctggttttcccaagtcatatatcactaggtatcttttaaatgaaaggtactaggcaatggtatctgtctaggagcctctcccttgtatgtttacctagaattcactctcagctactctatgacaaatacgcattccgttgttcagtacagctttttgtcatagaagccctctgggaaattgtaaagaaaatgaaaacctgttttttaacttccttatttgtctttccacatcctttagacttccttgtcctttgcctcctctctggaatgggatgataaaaataaaatagaatgatgtggagtgtgctgtatccaaaaaaagtatagaaagcatctatatatacagagaaccacatcacaatactgcattatatactatcagcatatcagaaatgtaaacatgtttccgttccacaacgaatgaactcattctgtatggcagctgccatccatttaagattaccctcattttttttttttttttttcgagacagagtctcgctctgctgcccagactggagtgcagtggcatgatctcggctcactgcaacctccaccttccgggttcaagcgattctcctgcctcagcctcctgagtaactgggaatacaggtgcacaccaccatgcctggctaatttttgcatttttagtagagacggagtttcaccatgttgggcaggatggtctcgatctcctgacctcgtgatccacccatctcagcctcccaaagtgctgggattacaggtgtgagccgccgctccctgccaagattaccctcttttatagatggtatagttgctgcaatttctggaagtacatgttgagtatgaaaatattagctaaggtgtgacaacaataattaaaattacattaaaaattggagcataccaaaatgagaatatttggaacagctgggctctttgagggcaggggtcctgtcttagtcatttttgtgtctctcaaagctccacaaagtacccttcatatgttaggcattaaatgaatgagtgaaatgaatgattgagtgaatggctctgctattacagcttctctttgtgtgttgccctgcgttttcaagcttcgactctggtcatgatttctatctcttcactggtcccctcccttttttttttttttttcataagagacttctacatctttttatatcctgatcttttctcttttaaccttagattgctgacatttccctttccatttctcgctttcttttatagtacaaccgcctttgtctgtttcagtctctcttctccatagctttttgtgtctatttttccattctgtgactttcctcttttctagatactgttggtgagctggttactctgttgagttaaagagggcaccccattgtgccattgtgaaagaaaactgattaattgtataatgatataatttctactgtgtcaggggtcttttggggctacctactgaggaaatggactgctctataatggcattttcagcatagtctaaacctcaaagcacctgtacttttgttcttttttctttgatttaaatgttgatcttcagactttctttatattctctattttaaagataatactcatgactgaacatactatttttggatgctgtgtttgtaaaatttaacacccccactccatgccaccccagaattccagttattgctgatcttcttttctggtacaggaaaaagaactaattggaaccaattgaaccctccagaattctgcattaggcacacaggagatatcagttgcatgtaatcataagattggtgtgattaatgtgtttgctcctctaaacagacttatttatttgaagggcagagtagtattgtggatatgataataaactttgactctaaatttattaacttcaaattccagctactccacttactagcctgggcaagttattttacttctataggtttccattttgtctgtaaaatggatatatgtggtatcaatcacatagagttattgcaaggattaaatgagttagtattgcaaacctctctaaatagggcctgacaacagtgagcattcaaaatatgctagttatctttgattaatttttgtacagtctatcccaattactcttcccccttgaggatccagttattaacattttgttgtaattgttcattggctttttttctctcatttattatactttaaaaaatcatttgcatttcagtcatagatatcatattaccccctgacatttcaccttatacctcctaagatgaatatgtaatcataatactgttatcactctccacatgaaatttaacattgatatgtaatctaatatattcaaatgtttccattaatgtccctcataccttgtaatgtctctttttccttatttccattttctttttagaatacaatcaaggattacacatttcacttagttattttgtctctttggaccctcttaatctagaatattctcctgccttttatttctctttcatgagtctgtatttttgaagattccgacccagtgattgtggaataccacacaatgtggatctgtccaattgttcctcattgtaggccaaagtactatctaggtaatgttgcctgcttcacagtggatcacagcagagtcatataatttgtttgtgccagttttggtgatgctgtttcatcttggatattcttcaggtcactccatttttaaggtttttttttgttttgtgttttgttttgccttgaaattagtatctgtggggtgatactttgagactgggtaactattttgtgtcccaagaacctttcactcatgggttctattgtccatcgatgatttgtgcctaatgatgtttttctctttgtattattatacatttctgggctgacgttgtttcttaccaaaagaggtctccacctctgtttccatagtaggatggatgaccatcagtgtaatcagaacaatttattcatagagcacggtcttcctttctgctaaagtaaattatatgtcttatttgctgcttgtatcacagctttcttaaaaaaagacactacatttcatattgaaatatagcatacctacaaaaaaatacacaaattataagcacacagctcaatgaagttccacaaaatgatataactatacttagctccttattcttttgtgaggctcaaattgtctgtcatttagccagtgggatcccctgatgctagttcctatgtcgttttgacatatctccatcagtctttgagtatgtcctggagtaaaaaaagatgtatcaaccttaccttacattttccctaccccaatcaagaatcagtcaagccctgtctccctttactggagaatggaatttagaaagaaagttttggccgctaggtgggttcattgctactggggtgccattgccgctaggcgataggtagattagatagattagataggtagataagtagacagataggtagatgcatgtatgttaccatgtacaactcaaccattcaaattcaacatcacaggattcttccgcactttccctcatttcatatttgtatctcctttattccacagtgagatcctaatgtatcgattcatttgctctatcctatagtacacggaaaatagtttcagaattactatatcaatacccctcctgacaatcaatctattaagtaaagttcaagatttatttggacttctttttttcctaatattccactaaggatatacattcagaatactgtcttcagaaattatttgaatttatttttttcctctgtgattatttacgttgatgtgatatatcattagatccatttatgtcctgcctgtatgcaagtttaggttttgctttataaatcctttttaaattttttatttcgaatatgtaaaactttacatggttcaagtcaaaacttacctggttcaagtcaaaacttacctggttcaagtcaaaactagaaaaaaaaattgttcaagaaagtcccactccatccctacccttccagctccatttttactcacgctctttgaaaatattttcattagtttctggtttatccttcatgtcttcattataaaaagaagcaaatatacatacgcttcctttttatacagaagttagcatgctatgtatactctttcaccttgcttttttatcctggcaattatttcatataattttataaagatcctcctcattccttattacagttgaatagtagttctatgtgtatattggttgttcacacaaaggactactattgattgtatctatggatggcatttagattctttccagtattttttactggaaataacactacagtgaataattttatgtccacgttttttcatacagttgaaggtgtatgttcagggtgaatgctgtaactgacattgctggtaagtaaatatatagataggtatgtagaaagatagaaaaggaaatagacacatagtttgttaactaatgccaaatttccctttacacaggttatacccttttgcactctaactagcaatgcctgagaggaactgttgctctacactctgtttgctaatagagtatattgtcaagtttttcaacttttgacaatctcataggcaagaaatagtatctcaatgtactttttttggatcaacttttttgttaagaagagttttcggtttgcagaaaagctgtgaagatagtaaagggttcctgtgtacaccacacccaggttctcctattgataacctcttatgttagagtaatatggttataattcttagtgtagttttaatttgcttttctcttattataagtaaaattaagcatattttcatatgtttaagggcaattcctatatcatctgtgaactacttgtttttctatttttcttattctaaaaatgggttttaagaatttttttttttttttttttagaccaagtctcgttctgttgctcaggctggagtgcagtggtgtgatctcagctcactgcaacctccgcctcccgggttcaagcaattctctgcctcagcctcctgagtagctgggattacaggcgcctgccaccgtgcctggctgatttttgtatttttagtagagatggggtttcaccatcttggccaggctggtcttgaactcctgaccttgtgatccacccacctcagcctcccaaagtgctaggaagtacaggcgtgagccactgcgcctggccaagaattttaaaatatatattagggtgattggagcttaatctgtgatatattttataaatattttctcctatcatgcacttaattttttatttttgcttatggtattttttgctatgcaaattttaaaaaatttcaggtaattgaaattctcaatcttttttttttctttttttttttgcatttggatttgagttatagttagaaaggctttccccacatctagttgtacagaaattctctcatgttttctcctaatacttgtattgttttgtttttacattaatagttgccttgatttttaaaacaaatcatgttggatctcaaggcccagctgaactcaaaggattaattccagtagaggttggttactaaaggaaaaggagaaaatggagaagccatattccctacctctccctatctctcctaggcaggaagattgggaattttggatcattagtgcagggctcagcagatagaagtcatcactgagtaactgaaaggatggatgaataaatgaaaatctaaatagatgaaatgtcttacaaatttgctacctctggagaacctgataagcaccaaagctggaaaatgagaaatggaaggacaaacaagtgatactctttctcgtttataggttgtcaggtatgagaaaccctaagtaccttggatcctgggagggaaggctcagcttttgaaaagggctaggcctgtctttttcattcttgtttcctttgtggagtctcctttcttgattttggttactttggaaacagtactattttgggtatttatcctccagaggatataggctagaaaaacctgacttcctcattggcagtccaattcttggagccatcttgatgccagatgtacaatcattttttccttgtgtatttttgctatgtgtttaagacaccaaatagctgaattaaatgtgtaaaattggctctgaaatccagatgtttagagatatagtgcaacttcatttattaccatgtgataatattatatgacagcataaacattctacatcttaatgagttagatgcactcggcacaattatgtataaaggaatgtagttgctaaattaattgtgttgtgatggtttttataactgaattttaatttccaaagtgtttgcttcatgccttccatctaacttagaagtgtgcactagtttcagtggtccagatttaggtctttatttggcctctgccagttagtactttaacttaaaaagtattttatgttctctaagcctaatcaaaaatgggtttaaaaagttactttagtgatatttagaatgttaaatgatataatgtaggtaaaatacctgacacaatgcctaacacaagaatatactcaagaaatacctctagttacaattattgttcattgatccttatataagcactggagttctgcattgatccttataatgcctcttgattctctctcaccgtcatcacttaatatctccttttcatatacaaattattttgtgtgtataataatcatacattttatttttcttttgtatttgaaccaacttagtttttttgattctcaagataatattttagaatgggtaaggaattattctctgcattttggaaatgaggaaatacaggtttataggagtaaagagaattcttgacattgtatacttaggaagtagtaagtggtaaagttggggtgtctgatgtcaaaaccattttttgtgtcttgtttccaagactctcttgtaacctccttgatgaaagatttctttctatgctgtagagtcaagagattttagtttcaggaatgagggatataatcaaaattggcctaggctagaaggaattttataggttcatgtaactgacaggtctacaggtagatctttaggcatgtctggatccaggtgctcaaactaggttaggaaggtatctcatccacttagttgcactttgcttcctgttggctttattatcctcaagttggggctcccttgtggtggtgcaatagctaccagaaacagtttccattataccatcagtaacttcttaccaatagttctgtcagttgtcttgaatcgaaaattgttacatcaaaccatgtgcccagctctaaaccatccatattatcaggatgactgaatatgttatttgatcaggcctggctatgggcatctctggaactttcgggtcagccctttataaaccacatgacctgaaaggaagtatgggtgatttgtgaaatcataatccaaatcctattaccatggataaataaactgtggtatatccataaaataggatgccattcagcaataaaaaggcataaattactgagatatgcatcaaatggatgaatctcaaatgctttacactaagaagtcagacataaatggtttatgattgcatttatatgatgtttttgaacaggcaaaattatagggaaaacaaatcagcagttgccagaggctggagaattagggtaaagattgactatggcaaagtacatgggaactttttgggatgatagaaatgttctgtatcttgattgtggtgtttgttatataactatatgcatttgtcagaattcatataaatatatactaaaagtgtaaattttactatttttaaattatacctccataaacctggctaaaaagcaaacaaaaatgctattacttaacagaggaggatactgaggaggtacaaaaaaacaaaacaaaacaaaaatccccaacgcgaggacaaaacagtacttatgacgtattcctagcttatggaataggatcagtagcagctagatgagtggttctcagtgtatttttcaccaccacacatattgttgagatgcccatgaacttccttgaacctacagtgtttgcttgtcatcctagtacacatgctgaaatcccatctctttctctagaaaaaaaaagtacctagctacaagtgaatgagaatgacattattgtagagacaatctttcaaagatatcagatgttagcagagggtaatacttagttgttactgctacttggacacccagtgtattattttgcagcaccatgatttagaaactcttgcttcagtaactacactttttaccttttgccgtcaatgtttatttgatgtgtaatgacttagagttattctttaaaatgtttttctggcctttcttaagtgcaagtgagcccatactatacatattattctgccacatacttctttcacttaataaaagatcttaggcttctttccacacttaaagtcattgttatgttatttgtctgagatggctacatccttgactttgatttggatggaacaaggtaatgcacagtttaagagaatgtcaacatacttagtgatcaagacaaatagtttaattccatttttttcaaaaatcaaataaatgccagaaaaatccatgatgaacaaaacattgaagttttaaataaggattagtacagtgccaagccattttggagcctaaagctaaggaaaaacaaaataaaattaatttaaagaaagtaaattgtttaattaaaaatcatttatgattgtcactaggtgataagagaatgtcaaacatggtaattcttccattgaaaagaagacaaacaaagaagtaagttttgaaaacatgtttaaattactttgtcccctagcctggccaacacagtgaaacttcgtctctactaaaaatacaaatattagccgagcgtggtggcatgcacctgtagtcccagctacttggaaggctgaggcaagggaatcacttgaacccaggaggtggaggttgtggtgagctgagatcgcacgactgcactccagcctgggcgacagagagagactctatctcaaaacataaaaataaaattactttgtcccattagagtcaggaaagtgaaattataatgaattctgattttagtataaataaaatatttacatttaatattgtaagttttaatatacctactttccaatttttcagtatttcttcaatgactttaaggttctccaaaaaaattaatttttaaaatatattaaaaatgtaggtagaagtgtccatgcaggctcaaatatggttggcagggcattaatatttatttaaaattgtgttttcttcaccatgatttttttggtttctaaaaagattgcactgaagtattattatcttgattactgaggatttttcttttttttttcttttcttttgaaatgggcatctcactatgtagctcagactggagtacagtgactattcacaggtataatcatagtgcactatagcctcaaactcctaggctcaagtgatcctcctatctcagcctcccatgtagctaggacttcaggcatggccaccacacctggctactgaggttgtttttagttctacttaaattttgtacctcatttgctgcaccctaactgtggccctgaatccccattactctgcctcttgaccaagttggagatgatcttgaagtaggagaatcaatgacagcagtacaagtcatgatagtgagcctttctgacctcacaaagtatttgtaccagtagcctgctatcttgaagctgcccccaactctttctttgtattgccatttaggtttccctgagctttgagcagattcttagctaggcaaagtagctgctggggcccaatgagtgggggatgctcaactgaggactcctgtgcccagtgcggtatgcagtgttcagagagatttcccttttctgtgtttgatttgcttttaggagcctctcatcatgttccacttttcctcagcccctaccatcctgtttctttattatcacattccatccccataagcccagctgaaatttttaaaatcctgggattatggtcagtttttggcatctcacaaagatgtatccctgagccaaggcagcctgataatcaccggctgggttttggtatcctggtggttaagccacttttgcacatattattgagtgactgttgaaagacttcttgtgaggtgaagagtctctggcacactgttggatgtgacaagagctccatgaaccccggcctttggctccagttttaggagcaggtttcctttatttgctgagcagcctttaccgttatgaatcttgcctttttgcaggaccagtggattctgcaaaggtttattaatcttgatttaatatattcacatgaaaaaatacaacagtgagagaataaagcttatgtaggcgttgcaggggtccctttgggggttcactttatattactcatagcagtgaaaagtaaaaatggcaagttatattagctaagttcgagatacaaaaggcaatattaatttcacaggaagtgtaaaaagatatgcaaatgtgatcaactccgaggaaaacattgcaatataccactccaggctttgaaattatgcagtttaataaacacttgttaagaagcttcacacaccaaatatcgaattttaaagcaagtgtttctgatcacgtactgtttttcaggaatggcattattttcctaagcttttggaaccctaaactggataattagggtgttcaaagtagcggatttatctgtagtagttacatgttcttgggaaagcacagatggttctggaaaaaaaatgcatgttattgtttttcaattaaaagcataatttagaagtgtaggccattagactagaacctgaagtaaaaatttctaaggccaatgtgtttatacagaaactgacaagggagaattatttatggatttttaattggtacagccctgatgagagaagctttcccataaattcctttccataaatttcttaggtctatgcttcctgtatgggatctatcctatgcatttataaccagaaccaaactcgggctcctgaagaatgtgaagggctgttaggaagttgtacaggattttaacatcgtaaagactgagctgtgcaggaagagtgaaaaaaatgttcttctctgagtgaaatggtttcttaggacatttcaatagacagcttagagcctaggaacaggtttacagagttttgggcagacatcagtaatgttttgttctaaatttgcttatctggtgcttttgcagaactttacactgttgtttagtcttgctaaatcaggagataaaaaggattacagagaaagataacactaatgtgggttcagtgtgggtaaagggaacccaccatacactgctggtggcaacttgaccacgtatatcaaaaccctgaaaatcttgtgtactatttaatcctgcaattccacatttaggtatttatcttaaagaagcatttgaacaaattcatgaaggtgtgtgtctgagtaaattttctcagagttgtttacgatattttttttaaatcctaagagcacaatatttggttcaatattttatgtctttatacagtataataccatgtagccttttaaaatgcctttgcagacaacttagtaacatggaaagatgtttatattaaatgaaaatggaaacagattacaaaatagcaagtatagtagagaacagagggtttttttaataggtataaaaagaagagagtttttaaataggtgtgtgtttacatatatgccctaaaatattaacagttccaacatcttgatttgtttttgcctagctgtagttttaattttatcctaaaataaacatggattatttgataataaaaataataagagaaaatgtacccatcaatgagagacaataaagtatactattggtgattcttgctttgtgaaagtatgtgattataaaacagatttgtactactaattcttatttgctctagagaaagattcctatggttatgatgagtgagtaatgtgttctttagtaatttaggtttagtttacagctctctagtgaagctggcctgctgaggaaacctggggttagggaaaatgaaagggatgcagctaggaaatgaagggcctgcagaaataaaggtcatgcagttttgaagttgcccagcggtcagtaggcaaataggattttcttcttacatacattcccatgtatagtgtaatgagggatacttaaaaattagccagtataagaaattgctttataacaaaaaggaaaagcacaaggaaaggtttttcacaattcaaacttcagatgtagtaaaatctgattgtgtaaagttagaaattaaacaaaatcctctttggcatggcaaaaaaccataaaccacacgtaataaaccaggaggaaatagttgcaagatgtatttctgataaaatgctaatattgctaatatatagaaagttactacacgttgaggagactaaagagaccataaatccgatagaaaagcagcaaagacctagaaagttcacaaaaattgataaaaaagggtccttaagtatatgaaaatatgttcaacttctctcataataatatgtgcagcatcatcgtggttatgttgtaatgaggagattgtttgaatgagccataatacattaatgcagtagtgtgctgtaaaataggatgaggaagatccctgtgaatcgggattggagtgatcaccagaagatattggtagtgcaaaaagcaaaatgtggaagactatatatagcatgctgcatttcaggtagaaagaaggggaaataaaaatgtctttatctatgtgtctgattatttttgcaaaaggatacacaggaaggataaactagaagatatgaaattggtcatctacagggtgggaatagcattagaagagttagggaaggaagacagtgatgtagtacttctctgaatacctttttatatagttttgagtttgaaaccatgttcatggtttgtatattccgaaataacattaaataacaagatgggggaaattgagtacagagtaaatgaacctaactatatatcaaatggatgacatgattacacataggaaaaaaatactgattcaagttattttgaatgcagtaccttgacttcaatttggttggaaggtacctgcccaggtggtttcccagatgggcatggccttcaatcaaacaacagaagtactggaaagaaatcttgaactttatacatttgttcttggttgtgttatttgtgggacaattctgaaattactttgtatccattgtaggattaagtaaatgtattattttgtggggagtcaggcttatcactgtggaaggagggcagtacaactgtggattggggaaaggcaaggaagagcctgagctattggatggagattagaagtatcaataggaagacatgactcaatatatatttataattcttacttgtcctcttaaagggcctgcaagcaataacactcctagcagcagtgaacacactgagtgcccagctcttgctttctaaatagcattccccactaaaaataagggcccttagaacagtggtccccaacctttttggcaccagggaccggtttcatagaagacaatttttccatcggtggcaggggagcggggatagtttcaggatgaaactgttccatctaaaatcatcaggcattagttagattctcataatgagtatgcgcagttcacaatagggttaatgttgccatgagaatctaatgcagctgacctgacaggaggcggagatcaggcagttaggttcccctgcccgctgctcacctcctagtgtgcagccagttcctaacaggccacagactggtaccagtctgcagcctggaggttggggatggggacccctgcttagagcaatgactaattgcagtttcagagcagggaaaggacaagaaaagcctggaacattttgttgtgccagaaaataaaaactgattaaaaaaaaaatgaggacctgtctgaatgacacaggaaccagcttgaaatgggacacttaagaatcaaatgagtaagatataaccaaaagaaagaagaaagaaagaaagaaagaaagaaagaaagaaagaaagaaagaaagaaagaaagaaaggaaggaaggaaggagggaaaggaaggaaagaagggagaaagggcagctgtttcttgcactagaaaaccaactaattgctgtgaaagaaataatagagttagaaaaatcacttttttacaactattatagtaataattgattcagagtagaattgtcaataggtgttaaaccattgagtgaaagcttgttgattagcagggtgtttacacagtcagaaaaaagtcttcccatacattattaattataaaagggaaaaagaggaatacctgcacatacacacacatacagtgaggtaatctggcagaaaacaccttatttaaggaatcaaggttaacacatcaagaatgggaccaagtttcatcaggtgccaactgatgtaatgcaatgagaaggatatgctatcacttaggtagtatgcctttcaaaaacatgtactatgaatctaatcctcatataacagtcagaccagcatagattctctgaaaagccacaggcctgtcctcttcaagaatgttaatgacatgatgggcaaaggaaagctgagaaagtattccagcttcaaggaggctaaagagacatgacagctaaaagccagtgcgatcctagactggaggaaagtggccatacaggacactcgggattgaagaaaagtaaatatggactacgtgtaagatagtattctatcaacgttaaagtccctgattttgatcattgtatgtgtgagagactactgtaattcctagaagcttttaatgttcacacctacaccgaaatggtttagcaaaaaccacttttcatttgtttgtttgagggaaggggagcagaggaggaggaagagataaagcaaatatggcaaaataatagcaaatggatgaatcttgggaagacagtatgggatgttcatgatatgattcttgcaagttttccacagttttgaatattttaattttttaaagagtgttttttgtttttttgtttgtttttttttgttttgttttgaatactaaaagctctttgaattttttgccgagccccagagctttgaatatcaaggagcctaactttccagatgcagtgactgcacttggcctccatttcaagatagctcatttcattctctttaatgctgtcacccaaatgactccaaggggtatctgtgcgtctcacatcatctcttgactaaaaaatcctttcacccattgctgtgaaattggatcctggggtcaaggggtgacagaatttatgtgctccttctctcctggaagtaccataattgtttgcatccctgaggcagcatagaatgccttggaaaggacggggtgactctgggaataagccatgcatagttttgtctggcacaggggagaaagtgtccaataatgttcacctgaaaggctttagccttttggaactaatgtatgttaacgtttatttgtatctaacaatagccttttttgatgtggttaactatacacgaggttaagaatgaatgtcatcctttcccatcttttgtttcagatgccagataaaccaaatcaaacaaaagcaacccccatccccacaataaaaagcatgctaaatgtttgatgtagttagtgaggatgaatttagaggttgtcagaacctaagtgttgatttcaggggaggccagattcagagaattcattcttggcattctgacaacagtgaacctttcccattattctagaatgggcctcactagggaaatataaattgtataccacccttctgggatttctacctgactttgattacttgtcctaacccctatgtggtgccttgatttctctctcttggtttgtgctagtttagtgatagtggatggaatccttgactttaatttggttggaaggtacctgcccaggtggtttcccagatgggcatggccttggggtaaacatgaaagggtcagccctggagctaggtcaggtgcagtggcagtcattaggcattaaggatggcttggagagatgtggttgcctagcttagcagaagttattctagctgtcaagaaaagtataataccaacattgcctacatctgtggcaaatcttgtcacacaaaggaaactatcaggaaagagtatggctttcttggcatctacagagtagagtaatcagtaaatattggctacataataattggaactaactttaataaatatatatttgtacactttaaagtgtaggaaaaatcttccctttaaccattttagtttcttggctagggctctataacaaaagacagattaataagagaaaagcatacaaatgtatttaatacaagttttatgtgtcacgagagcattcataaggaaggaaaatctgatgaatcagttaaacctgagtgcttttatactaggtttgatgaagagtggaaacttgtggaaaagcatatgaactaagtgtagtaaactaggggaaacttaccaaggctggttcctggagtttcttctccgtgtgtccctccatcttcagagataaggatgctccttttctctgggtttagggagggacctctcacacaaggggcttctgacctgcttcagagagtccttccagcacatgctgtttctcagactccttcagcttaaaatattcaaaatgccaaggtgccatgttttgtggtagcatgttctgaaccccatcaaaagtcatatgtacccattgcagaaaatctggacaacagagatttctataaatataaaagtagacattaccggtaactccactatgcagttaaagctgtatttttttaatccatgcatggatattttaacatagttgtattttgtagttatgtatcttttcacttaaccttatatcatatgcatttacgcatattattacaaagtatttataatcataactttaatgactaaatactattctcctagatggcagaatttaattttcactctactgtagggcatttaatgtctttctaatgcttttatgcttccagtaatgttagtatcaatgtttataaatttacttgtttgagaccaacaaatatttatttataagtatgcataatttgcctttttcccaccttctcaggagaaaggatagctgcttctgtcctaagaaggtgctgagcagagtaatagcaggagttatagacgtctaatatacattacactctaatatacactctaatatacattacaaaagacaagggaattacccagaggtaaagctccaagggtggagagcacagaggtgacctgagaaagggtgtgtggtgggagagggctggttgagttggtgggtgtcagtgagaaagagagcaagggtagctgtcagtgttaaagctgagagtattggaaacaatggcagtgccttccaggggaggctatgggcttgcttactttatatttagccaaaaaagatgatttacatctactattgctattatttcaaaaagaggatatgttaacaccaaaagaaaaaaccaaacaaacctggaaggatgaaatttcaggctttaaaagtgaaatgaaattgctccattaaaacctatcaaagtttctttatttttctcattactctgtggactattgatgatttgaacatactctggcaacagatcccaatccatggactgacattggggagccataagaccaaatcacctttaaggtccattgattcaagcaacagaaacctcgcatttcatgaagacttggtttccagtcttggtgccatatttgatttgatggatgacttttgaaccacatgtctcattaatgtcttagtttccttgtttgctcacttaactttatgaagatcaagtatgatattgttttttgaagtgctgttgtcttaacgcccgggtactttctgatctatggctcagaaagggagtgtaataaattgtaataaattgcactgtcccagaaaataaatggcattccatcatcccatagttgtgcagcagcccatcttttggcagtttctgagaatgattgcaagagatagcaaatacaactcaaaacagcctagatgaaaatgatattttattggcttatatactgaaaaaatatagacacgtatgacttctagaactgctggatccagaagatcaagtgatctatgcattgtttgttcttagggtttatctccctggaatggcaaaaaggctgtcagttatatatacccattccattctaccagtttagcaacccagtgggaaacaatagagtttctcatttccaatagtattggtgagagttcaaagttttgatctcattgacactgtcttgagttatatgtccagggtgatcaacctgatctgggtggtgtgcccatgcctgaagctgtgggtagaatcaaacccttctgagcaacatggactaagaataaagatggagtagtttttcagaaaattgggttgctggtaaaagaagatgggtgcacggatgatgggaaggtagaacaacatagagagagctactataaagtagcagtagcctgtcaagccaggaaatgcagccagtagaactgccctggcctttctaggaaggtcttctaggactgtgtgtaagacattctctactgactgccacaacatcactgtatagtgacaggcagtgtctttggcatcaattaaatcctaataccactaagcagaaattaaaaagctttaatgagatcttcaacctattgacgaatgcccatgacagtagctcatgccattgatgtgtggagtcaaatatctttacccactggggatgtcatcatttaaatggccctattgattttgagttttggcagagcttctttaaccctgggaggctccaagttgcctgaagggacgtagcctaagacataactaactccatgttatgtagtcatgaattggacccaaactaacttaatcatctgtcctagggcagtctgttctaggcagaatctctgggaaaactagagcagttcattttatgttttatgtttattgatgaattcatttggaaaagctgctcctaggcattccacacattctagtcatataagagggactacttgcacagaaaatgtttaattattgtaccaagtttagatgcaggtttacaaaatgaattttcaggttatcagtttgggttattgtttcagttattgattgctgtgtaatagactacctcaaaacttctgttgcttaaaccaacagtgattcattatttttcaaggttctgtaggtcaggaattggggcgtggcttggctgggtagttgttccgctccatttggtgtaggctgggtcaatcactaggctgcattcagctttcggctatgctgccctggaagatcaacggattcactcgtatctgtgcattggtgctgtgcacatgacctcagtctcttcacaagtgtttatcatgtagtattctggattggccttttttttttttttttttttttacatcatggaagctaattttttggaaagtttcaaagtagaagctgccagccttgttaaggactacctggaagtagaacactgtgacatctgtgcactcaatgggccatagcaagtcagaaaaccaacccatattcaataggagagtacattattaaaaatagttttactgatgtattaagcatgtgttgacacagttttatttggatgttcataaactctgactgaaaagattattttaaaaaactgagctggagctagcataagggtatgtgcacagacatagacatatttttaaacatctatatcttaaaggatcaatatgagtttccccttttgacaaaaaggattgcatatctcattctgtttacctttttgtcctgtctaccaagaagcccagacgtaaattgaatcatattaacccaatttgcctcttcttttgattcctggctttgattttctcttttgatttacttacctatttctgtcaatatttattttgagcctattgaggaatggctgcatatacaatttttaaaatgaaccacccatacagctatagggtactacactgtagcatatactacattgtagcatgaaagcttctaagctacagtcctcactattgcctccactggtaaattgttttttgtaggaatgaactagaagaatgtttgttcatcagtgagcagttggtctggcatatagaagtgctctatagattgtagctattaaaaattgatctttatataaatgaatgtcaaagtggttgttatatataaagtttcggtgccgcaaaagaaacggcatcgaatataaaattttcttttaattctcagcaaggcaagttacttctacagaagggtacgcccttacagatggaacaatggtgagcgcacacttggacaagggaggggaaggtgttcttatccctgaggcacatggcccctgctgccgtgtcgttcccctgttggctaggattagaccacgcaggcgaaactaattccaattggctaatttaaagagagtgagggggtgagtgctttggagggaaaaaaaatggttatgcagcgtggagaatgagtcagggcagagcaggtagcaggtaatcagaatgagtcagggtggagtaggtgatcggaatgagttggggtggagtaggaattggaatgagtcggggtggagtaggtaatcgaaaaaggttactttacgaggaagttaagtttaaaagtagaaggcaaagaattgaacatactggcatatttattctttgatgagaaatttagaacttatatctaacatggtgaaatctgaggtggattgtatcaatgtcaatatcttgatttaccattgggagaaactgggtgatggatacaaaagatctgtctatattatttcttaccactgcaagtgaatctataattatctcaaaataaaaagttaaataaatacatgttacagaactatcacttttatatgttccaaacaaaaccattgttcttatatggacattatgcctattgaatgtaatcaagtaatatcttaaatgtgtttaaatatataccaattagttggttgccggctgtgaaacttttcatttatatgaatatcttatttctttgtcttttttcctagaataagtcaagaaacagaaataatttgacatgttattctaaagctatcatttaaaggagatcaataaacctatatttttttttttcttagaaagaaaatttaaaagggatcttcagctcaggatgtgtcaggaggaagtgggagatactgacactgaccccagaagaaatttgaattggaattggatgcgtagaattctactataatctttgtattcctatgttgaatgtgtagcggctttcccttgtatcctcgccaccttgctgccttttgaaacactcaggaaatatagttggctaaaactgaacaaacaataaaccttaggcattgaatggagttggagaaaatgcggtgctttagcatattttaactgttaatgtgcaacccaaatgtccctggaccctgaagggcatatccacatgtcctcaggagttaaagtcagattacaaccttccctccagggttcacagttcttggagtgttagaaagctcataacctgggaagcagaagccccagatttcaggccggacttaattaccaacttgttgtttctttggaaatatcatttaatcttttagggattacacttttccctatcctcaaatcaaggagattggatcagagttcactaagagtccttttagctcagatatcgcattattttccatatagacgttcatgtttatcaatcaacatttgtaagggaaatttccttttatgttttcatagaaaagagtacttatagacaggctaaaattcattgtttttaaatagtctttgcttgtctcctcctgtcccccacaccaaattcctggcactacctcagctgtgactgatttcttgacatttactacattctggccagaagtcagaacccttttttggtaaaagggagcttaaaatttcaaaattatttactctttttttttgttttttgttttgggacggagtttcactcttgttgcccaggctggagtgcagtggcacagtctcggctcactgcaacctctgcctcctgggttcaagcgactctcctgcctcagcctcttgagtagccgggattacaggcgtgtgccaccacgcctggctaatttttgtattttttagtagagatggggtttcaccatcttggccaggctggtctcgaactcctgacctcagatgatctgcccaccttggcctcccaaagtgctgggattacaggcgtaaggcaccgtgtctggctctactatttttatcttatacactttaaaagcgtattttaaccaactaatgagaaaaggcatatatgtaaaaaacaaaacaaaacaaaagtcctaacagaactgaacaacaagtttaagcagagaaaaatagggatcggaagaagtcattctagacgacctaaacaagttagttctgctctgagcttcttagatggccaaggccatctaagagaagcaagttacataactgccattagttgcaaaaggaagaataccactttgtcaggagagacaaatttttcctaactgtaagaaaaactttttatatcaatcgttatatatatgatggtaaaaaaataacatagttgataacatttgcaaatatagtcaaatgaagtttgctgtgagattatagatctaattgtttcctagattcaccctggataacaaaccacggcatgctataaactggaactctgaaaagacatttgtacaggttgctaatgtattatgacctaggtagtagatagtctagatagcctttctactgagctaatttggtgtagggatagaatgttgagtaaatggaggaatgtattaactggcattcaagaatagcttcttcctgacctaaccaggaagatctatttaaaaaagaacaatacagacagagggtaggactccatcataccgtttttcatgacaatgagtacttggaatttgtttcttcaggaatctctagaatgtgtttttttctacctctagatcagctttaaaaccctacctttctgtcttgatgccaactgcccctctattttttccatatactaggtttctagcaaccacagattctggattatttctcttaccagaagtcaatgtgatatttgctaaataccattgtccctatgagtattacatgaaaggttgcttttaccactcttgatctcttagccttctgatgataatgacatattaattatggaaaagccaagaagattgcaggcaaaaataatagtttttcaagttcttctcatgaatattggatcactttcttattagcataggcgccttgccaagatttttcaatgcttgtaatttggatggcaagcatcctggggagggatcatatttgcttgtgtgctctgcttggcaattggcctatttttagccattcatggtattaacccccaaataagataatcaaatttgtcaaataaaccccagataattgagtcttatggattcgatattacataaggatatgatttaaaaataacttggtattaaggcaaagatgtgttttatttatttaagtttattcatttgtgcaacagatatttattgagcatttaatatgtgccaagcaatggtttaggaaagacaagatattgctctcattgagcttttattttatttgggagagggggaaataaatatgggagccaataaatgaatatggtaagtcaggcattgaggatattcctaagactgtaaaacatatgaatgtgtcagaggttattggtgtaaaggacaattagaggaggcatctggaggaggtgatatttgagctgagagttaaatgtcaagcaagagcccaccttgcaaaatattttgggaaaagtactccaggtagagaagttaacaaatataaaagacttgttgccataataagctcatgatgtatcagaaagaggaaaaaaggccaaagtgactggggtagtgaggttgataattggtgaggaggtagaagtggacaagagtcaattttgaagagtttcatagaccttggctgggagactggaatttctcataagagtaactgttaaacaatgaagagttttaggccaaggcatgacatgatctgatttatattttaaaatacttattattgctcataagtctgtcataaaaactctcttataagattttcagtggctaatagatcactttttgtatgcagaagggtttatttactataatttgggcttttaacaaaagtttaatttattaaagatatattttaaacttaatgttttttattattgatacataataattatacatatttataggctcatgtgatactttagtacatgcatacaacgtgcaatgatcaaatcaaggtaattaggatatccagcaccttgaacatttatcatttctttgtgttaggaacatttcaaattctctcttgcagctattttgaaatatgtaacaaattattgttaactataatcaccctgctgtgctatcaaacactagaacttattccttctatctagctgtctttttatatctattaaccaacctctcttcacccctcttgccaccctttccaggctctagtagcacccatcaactttctacctccatgagatccacacttttaagcttccacataggagtgagagaatgtaatatttgtctgtcattcttattatttttcttcttcttcttttttttttttttgagaaagggtctcagtctgtcacctaggctggagtaaagttaaaatggcacagacacggccctctgcagcctcaattttctgggctcaagcgatcttcccactttggtcttccaagtagctaggacagccagttaatttttttatagagatagaatcttgccatattacccaggctggtctcaaactcctgggctcaaataatcctccctcagcctcccaaattgctgggattccagatatgagccacttagcccagccaatatttgtctgtgttgggcttatttcacataaaaataatgacctccagttccatgttgctgcaaataggattttattattttttaaaatatattttaggcttaattgtataaaataagcggaatagtatttcattgtgtgtatataccacattttctttatcttttcatccatagctgatggacacttaggttgattccatatcttggctattatgaatagtgctgcagtaaacatgggtatgcagatatctcttcaatatcctgatttcctttctttcagatatatacccagcagcaggattgctgggtcacattgtagatatttttagtttttttgaagaacctccataccgttttccataatggctgtactaatttatattcccactatcagtacactagcattcctcttttactgtatcctctccagcatctgttattgtttgtctttttcatagtagccattataactgtggtgagatggtatctcactgtggttgtgatttgcatttccctgaggattacggatgctgagcattttttcatatgcctcttgtccatttgtatgtctccttttaagaaatgtctattcaggtcttttgcccagtttaaaactgaattattagcatttctgctattgagttgtttgagttccttatatattttggttattaatcccttgtcaaatggatagtttgcaaatattttctcccattctgtgggctgtctcttcattctgttgattgtctcctttgctgtacagatgctttttagcttgatataatcccatttgtctattttaacctttgttgcctttatatttgaggtcttatccaaaaaatctttgcccagaccaatgcccagaagcattttccccaatgttttcctcttagttttatagttcgaggccttacatttaattatttagtccattttgatttgattcttgtatatgtgagagacagaggtctagtttcattttttctgcatatggatatccagttttcccagcatcatttatgaatagactgtcctttgcacactcaatgtttttggcattttgtcaaaaatcagtttgctataattaaaggatttacttctgatttatctgttctgttccactggtctatgtgtttgtttttactccagtaacatgatgatttagttattatcactttcttgtatattttaaagtcagataatgtgctacctccagctttgttctttttgctggggattgctttggctatttggggtcttcagtggttccacataaattttaggattttttctaatcctgtgaagaatgatattggtattttgaaaaggtttacatcaaatctgtaaattgtttttggtagcattgtcattttaacaatataagttcttccaattcatgaatatgggatattttcctttttttgtaaccagatcttcaatttcttttatcagtgtcctgtcatttaattgtagagatcttttgcttccttggttagatttattcctaggtattttatattttctttctgtagctattgtaagtaaggttgctttcttgctttattttttcactagttcattgttggtgtatagaaatggtactgatttttgtatgttaatttgtatcctgcaactttactgattttgttgtctcattctaagaatgttttggtacagcttatatgggtttctgtatttaagattatgtcatctgtaaacagggacaatttgacttcttcctttccattttgaatgccctttatttctttctcttgcctaattgctctggctaggacttccaatgttatgttgaataacagtggtgggagtgggcatcatggtcttgttctagttcttagaagaaaagcttttagctattccctgttcagtataatgttaggtatggatttgtcatatatggccttcactatgttgaggtgcacttattctatacttagtttgttcagggtttttatcaggaagggatgttgaattttcttttctttttctgcatctattgagatgatcatatggtgtttgtctttcattttgttaatgtgaagtatcacatttattgattagcatatgttgaaccgtccttgcatcgctgggataaatcccacttgatcatggtgaatgttctttttaatgtgatgctggattcaacttgctagtattttgttgaggatgtttgcatcgatgttcatcagggattttggcctttttttgttgtgtccttatctggcttggtatcagggtaataatggtcttgtagaatcagcttgaaagaattcccttctcttttattttctagaagagtttgagaaggatgggcattagttcttctttaaatgtttggtagaattcagtagtgaagctatcaggtcctgggcttttctttgatagaacatttttaaaattattgattcaacttgttgcttgtaattggtgtgtttaggttttctatttcttctaggttcaatcttgttaggttgtctaggaatttgtttctgtttggttttccaatttgtgggtgtacagttgtttgtactagtctctaatgatcttttgtatatgtgggttatcagttgtaaggtctctctttttgtttctaattttatttatttgggacatttttcttggttagtttagctcgtggtttgttaattttgttatcttttcaaaaaaagttttaaaaattgatcttttgtaagttttagtctcaatttcatttatttctcctctgatctttgttatttctttccttgtactaattttgggtttggtttgttcttgttttcatttttgttcttgcactgttagattatttatttaaagtctttctactcttttgatgtgtttattgttataaacttttctcttagcactgtttttgctgtatctcataagttttgatatgttgtgcttccattttcataaatttttaaattttcttcttaatttctgtattgagtctttggttatacaggagcatgttgtattcatagagcttccaaaagtccctcttgttattgatttctagttttattccattgtgttcagaaaagatacttgatatgatttcacttcttttaaatttgtcgagacttattttgtggcctttgtgatctgtccttgaggatgttccatgtgctgatgaaaataatatgtattctgccactgtcagttgaaatgttctgtaaatgtctgctaggtccatttgagctaaaatgcagtataaactcaatgtttcgttgttgattttctttctagatggcctatccagtgatgagagtggggtccccaactattatggcattggggtctatctctccctttggattgaatactatttaatttatatatcaatgtgttccagtgttggatgcatatataactgttgtagcttcttgctgaattgattcctttatcattatatgatgatcctctttgtctctttttacagttttttcacttaaagtctgttttatctgatacaagtaaagctactcctgctcgctttttatttttatttgcatggagtatctttttctattcctttgctcttaatctgtatgtatccttagtagtgaagtgaatttcttatagaaagcatatagttggatcatgtttttgttttcttttgttttaaatcaattaagtcagtctatgtctttaagtggggaatttattctgttaacattcaaggttattattgataagtcatgacttgcttctgtcgttttgttaactattttctggttattttgcatatcctttgttctttcttctcttattatttatcattgtggtttagtgattttctgtagtgataagttttgcttcttttctctttttttctgtgtatctgctctactagtgagtttgttgttgatgttgttgttgttgtttgtttttgagatgagtttcactcttgttgcccaggctggagtgcaatggcacgatctcagctcactgcaacctccacctcctgggtacaagtgattctcctgcctcagcctcccaagtagctgggattacaggcatgtgccaccacacccagctaattttgtgtgttgagtagagacaggatttctccatgttagtcaggctggtcttgaactcccaacctcaggtgatctgcccaccttggactcccaaaattctgggattataggcgtaagccaccatgctcagcctctaccagtgagttttatacttttgtgtgttttcttagtagtgataatcattttttgcttccagatgcaggagtccctttagaatttcttgtaaaactgttctagtggtgatgaattccctgtttttacttctctgagaaacgttttatttcttcctcatttctaaaggatatatttgctggatatagtatccttgactgacagtttttttccttcagtactttgaatgtagctttctgttctttcctggtctataaggttctgctgaaagtcttctgttagtctaatggggattcccttaaatgtactgtgacacatttctcttgttgtttttagaattcttgctttgtctttgactttgacaattgaactataatgtgcatcagggcttgaatctattcgggaacctttgagtttcctggatctgtatatacacatctctatccagacttgtgaaattttcagctattagataattaaattaggttttttttttaatacatcttttccttctggaactgccataatatgaaaatttgttcacttaatggtgtcctataagtcttgtagtcttttttaaaaactctttttctttcttatttttttttctctctagctaagtaattttaaataacctatttttaggttcagagattgttttctatacttaagtctgttcttgaagctgcctattgtattttttattttattaattgaattattttttataatatctatctctgttgaatttctaatttatataataaattctttttctgattttgttgaattgtctatctgtattttcttgtatcttgttgagtttcttaagagtactagtttgtattccttttctggcaattcattgattttcttgtcattagggtttgttactagggagttattttgttcctttggcattgacatatttctttgctttttcatatttcttgtgtttctacatcaatgtctatgcatttggtggaaaaattgcctcttccagactttctagagtggcttttgcagagaaagactttcacctgtagttggatcttagtgtgctaattaggaaaagtgtggtgactttgtttccaggtaggttcagtggtatagtatctatgcagtttcttcagctgcattcagtgtcaacagtaactgtggatgcctgaatgacttaggctgtaaaagtgtatggtggtgctcatcatcactggccatcagagaaatgcaaatcaaaaccacaatgagataccatcttacaccagttagaatggcgatcattaaaaagtcaggaaacaacaggtgctggagaggatgtggagaaataggaacacttttacactgttggtgggaatgtaaactagttcaaccattgtggaagtcagtgtggcaattcctcagggatctagagttagaaataccatttgacccagccatcccattactgggtatatactcaaaggattataaatcatgctgctataaagacacatgcacatgtatgtttattgcggcactattcacaatatcaaagacttggaaccaacccatatatccaacaatgatagactggattaagaaaatgtgacacatatacaccatggaatactatgcagccataaaaaaggatgagttcatgtcctttgtaggggcatggatgaagctggaaaccatcattctcagcaaattattgcaaggacaaaaaaccaaacaccgcgtgttctcactcataggtgggaattgaacaatgagaacacatggacacaggaaggggaacatcacacaccggggcctgttgtggggtgggggcagggggagggatagcattaggagatatacctaatgtaaatgacgagttaatgggtgccgcacagtaacatggcacatgtatacatatgtaataaacctgcacattgtgcacatgtaccctaaaacttaaagtataattaaaaaaaaaggggtatggtagtggcagtgacaacataggttgttaatgtcctcagtggcagggcttttggggtcctcctattctgattttcctcacaatggggataattaaacaagaggatccctcttacatggcctacaagcagttccattgctttgagttccagggattggtacttgaagtggctatggagtcagggtgctaatatcagagtttcacaagcctattgtggctcttgggtcctggggtacaggttcactctctgtagctgggtcaaatataggtttcccacagagccagaatctatgactgttaggcaccccctaccagctttgattcagtgggtcaggttgtagctgtgattctacccctggggaataggatacagccctggctcagctctgggaaagaagcagagttttaggggtttgagcacagcatgcatggtacagctataatttaggagcctaagccaatagggttcagtggcagcttaggtccctgagaatgaagaactatgtagtggtaaatttagaccttggaatggtggggcatatctgtatcccagactccatgtggccaggcgcagtggcagcaagtaccctagaatgactgagcatgggtattgtttgggtcctggagggcagggagtagcacagtgatgagtccactccccaggaaacagcaggtcttagcagttcagactctagtgggctagtccagcttcaggaaagcagggtactagattgtccagtagggtagactgtcttaggtcatgttctactctgtttccttgggacacaagatactacatcagctcagccctgggatgcacagttgtttaacttgaccaaggcaatgattccccaaggggcaatgtgacactttaactcaggcatgactgttctgtgtggcccaggcaccatttacctgggatacagggtcctaccaaagcactatttccttgggagatactgtgccattttggctcagacccctagaagcagtgtacagttgcagcggagagaagcagatggagctgttctgccaaagcactgtttccccaggagggaatgtattgcttcatctctagcacaagagggcaggtgaagggagagggcaggtgaaggtgagggagggcaggtagagcagttttcactgtttggctccatggggaaaggcattaacagctgctggcagcttggctgtggccactggtttggggtggtttggaggcagcttagccttatggaggcaggggtgtcaagcctgctcaccctcagagaaaatcacacttcagcagtagttccagttctaagatgatatagcacagttgccatgtgggctacagggaatagagcacagtattagttccttctctgaggtgagtgtggctgtgtggcctgtaggcagctccctcagctggacttagtgccagtgaagactacaaggactccagtagtgaggactgtgggtgtccaaggtgttggtggaggctactggaatcctcttgcttgcctttttcctatagggaaagtttcctctgggtttctggctcatctcagctggggatagggtggtggagttgtgatgtttccttccattctctttgtggctgtcctgagtttctgtgctcaccagggtttctgttactcctttgatgtattctggcactctccttcagttatgtacattaaagtgtagttgtttattcattgttttggctgtcactgtggaagggatgagtgctggagtttctagtgagccatcttgctgatgttgctcccctaaacttaagtttgaaaagcatttagagcaactcaggttatcttgtgcaatttatgaatttatgaatgccataaaagaataatgtctacttaaatacacttttgtatttacttgttaaatgtattcatcaatattttaaaataactttacacatttaacaattttactttctttgtaaacacttcgaatacttggcagtacaagctcacaaccttaacaagcaaaacctttctaagctttgaagccatgttttgaatcaaatatactagactcataaagaataaattcagttatttaaacatctcagtactacttaaaaacatcaaattctgttaaactttttaacctaaaattagaagtcagtaatcaattgtacttctaattgcaggggcaatctgtcagattcttaaatatgataaatcctcttaaacatcacaaatacttgatacaaaattctcagattgttccattacctaaactcaaccaaaaagtatgaatataatggatttcattgaccatacaatctattttttatctgtctcagggttgaaaaatcccttgcttactaaaggaacagtgataaaatctcaggtggtttaaggttaggatcctgataacctgaggttatttatcactgtaaagttatgaagtcaaaaatttatgttcataatatggtcacttcttcagagatctctgattgcattgaggcctgggaaatagatatataagtaaatgaatatctattcatttacacacacacacacacacacacacacacacacacacacacatgaataagttttccttagctaaaaattgacaccctgaaatttttcatacttatttagaatgggggctgtcttctcaattctatgtctgctacttactacctgcataacttttggccatttgcttaacttctctaagtctcagtttcctcacctataaagtagagataatgatcataatctactatgtaggattgttatgaaaatcatatgaaaaaatatatttaaactgcttaggactatgcctggcatctactaagagctcaaaaattatcattttaccattattatccattatgctgccttcaagttttcactcgaataactatggatgtcttaaacttaattaacctaaatttgataactttcatgatatgtgaaaaatgggagaggcccattaaattaaaggtccctgcatgctgaacaagcacaatgaaccagttagcactgtggcagagggcagaaaaggtttgaggataaggcttgtctgtggattgggtttgacagaactaacttggcatttaaggagtatgttgatgggcagccattcaattaagtggttaacttggaaagtgggagtaggatagtcagtcacacattgtaacagggtagcccaagaggtgggtagaattctaggatggggaatccagtatctacacacatggtacagaaaaatgaatgttggacaagtagtaagcatcagaaaaggtttccaaggtagtcagacctatttctttggatgggttcaagtatgtaggtgggaggaagaataaagaagccagcaagggccagagtttattcctagagggatttgggtcctgggaaggtgaccaagggtgccaggttgaagcccaggtaagaaaagaacattgctgagcatctactgttgcctgacatatgctcccattttaaaaatattctctatattatctcatttctctctcatagactcacaatgtaaatcttattgtatttattttataggtgacaaaagacatgattaagtaaacgtttccaaggtcacacgtccagtaagtggtcaagccaaatcaaacacagaccttcctatttcagaggtcatgatcattccatgacaacaccctgcctcagaggtgacttgatgttgagcttagagcattgacctagctagtcttaaatctctcctgccatatgccatgattagtccttagaagaggataggttgagactgcagatgggaggtgggtctaggatcgcaactcttgggagaggaggcccgcagaagctgggagagggtggagactaatcagcaagagtgacagatgcatagtctccttcttctgtccctgtcctggttacttgttctaaacaggactctagttctccgttagaagtagaaagtagataaaggtaagctaatgactacatatggcaatgattcttaacctcttaatgtgatgaaagatgtgaggttttctagaaaaatgtgcacagaccagtagttataccattccacattcagtttcagagagttcccagagctcttgaaattaatgaaggatttggtcactagcccaagagactctttagaccaagaaaatcttcagacctaggatgcacacagccttttcagaactgttttctttgaggagtgttggcgtgattgccgaccgatgctgctgctgctgatagcagcaaacatgtatttagagtttaataaatactagcctttattttattaaattattttaaaattctaacgacagccctacaatgtaggtattaccattagccttgtctagatagatgaggaaatgactcagagaggttcaatatcatgccccaggttacacaactcataagtaggggtgtgctcaatacagttcaataatttcataatttaaaaaacaagaggttttgatctggtgtagttggggagagtggacaatttttaacacataccatataaatagtgatattttatttttactataggcacttgcttaggagtgacaaatttcacccaccacattttaaaatgccatagcgggaagccctgctgtttaccttgctgttgcactttctatacatcgaagtttatctaaatattgtaaagggctttgctgttgaaacatactctctgaaatgggaggcacacattagctgggttatatttctttccattagcaaattataagattactacttagaattttaaacagtgcttgttccttcaaaggactttacagctatcagccagttaagctttctcagtctcctgtggagtcagtcagtgtgaatttcccatcctgtaggccactatttagtactctggatataccaggaccatcagatagaggcagcttggatggtttgttggtttgtgtacttctgaatagtcttcattcagagagaatggtaaacccatctgtagaagaagggcaggccctttgtcgggagaacacacaaagcaacaaaggaacctgttgaaggaaacaaggctgcacagcaaatccacagctccctgggacggcgctgagtgcttacttttgtaagactgctactaaatattttcctgacatgacagaaaacaacttgcccaactttacatgtgtgtctttggagagagccataggtggttatcagaaaaagcactcaatagtttcaaatctttcttcctcccagtaaaatcatctggagggaaaagttgtatccttttgctttcatccactttggttctgcattgcaggtttctttatgaagctcctggtagtgtgatctctcactctctctctctctctctctctccctctccctctctccctgccttgttcccctcctccaaaaacaaaaacagacaaaaaacccaagttggttggcatgctaccctacaagttttttcatcattcagagaccttgaagatcaaatctaagaacgcaagagttatagtcatgttgcaggagtgtccggtgcacaggaaagtaaataataaataatctttattttttgaacggggaacaatttaagcatctttgtctatgaactcaaaggcaaaactcttctagacttttgtgagttgttgccagtccttggttatgttactaccctataattcagggtttcctgaaaggagttaagcaattttaaggccatcataaattttattattatttcctgagatgtattacttgggttctcagggtgatcattaaatttgtattctctttgaatcattctgattgaggatttgtctcaataaatgatcattattctttattttcaaaaggaaaattgccgttatgggctaatgactgaggaaaatgaatttagagaataatgtgggattatttttgaggcataattttctgttcaaaagccaggaagcaaaactggccagcttataaaaatgcagagagtaatgtatttttgctccttgagaatttttctgggtagaagaattaaagagaagaaaaggagaaggaaagaaggagggggagcaaaagaaggaaagatatcccactgatgtgaaatatctaattaccctttccccaaagggtctcacagaaagtacgtatttattggaaccaaaatgaattacaggattatagagccctgagctggacaacttatgttagggaattaactttctgctacaagtttttaatatgtgtgaagctgtttgcctacaaatgttttttgcaacaagcgctcatgagatatcaaaagaaatgaaagcatttcctcatagcatggaatttctaccacaaacaaaacaaagcaggcttatggcaaactaaagtcccattcaggagtgtgtcacccttagggacacacagcaggcaaaacatgcaattcctactgaattcatactgaagtatgatcttgtaaattgtattcacctgctcatattacagaggtttctttttatcagttgaactccatttgtattttcctcagtatattccttttaaaaatataataggagctgggcacagtggctcacacttgtaatttcaatcctttgggagactgaggcaggaggatcatttgagtccagaagttcaagaccaacctgggcaacaaagcaagacctcgtctctacaaaaaataaataaataaataaataaatacattcaaaaaataaaaaatctgggtatggtggtgtgtgcctatagttctagctactcaggaggctgaggtgggaggatcacttgagcatgggaggtcaaggctacattgagccatgattgtgccattgcactctagcttaagtgacagagcaagactccatttcagaaaaaaataaacaaatacagtcagacatttagcatcctgacttacacgttaaatatgtcaccattcctgggccccttccttatttatacagagtcctttataaacaggctggaacttggaaagtatcattatatacctaataaacttactatttttaaaaatgatcatgtttagtgctgaaaaagttgtggtgacagtgttatgttattagacttctggtagcactataggttggtgagttccttttgctgagtagtttgatagtagaaagcctgattaggagagataatcatgggagacaggagttctcggagacttttcctaaggtagtcatgtaacagaagcagaacagaatattcactagagtgccaccataaagctctctatagtttcactgtgaaggcaatgttaaaatatgcaaaacgggttctaatgtaacttattataatgcttctgatataacgagaaaaaggaagatacaaaatggcaggcatgcaagagctgcagatatgcaagaatgagctgccctatggataaggacagaaaggcaagaaccacagatggaaacgggtttacatgggattccttttcttcctaaaaatcatgttctcagtgctcctattgtgccatctttttagaaaatttaattaagagtaaggtaacaaatgtagacatcaacgaggaaatgctccaaggggtccatgttgacaatgtctggggcatcaccaggagaataggctaagtgactatttcccaagcagttctcctggggtacactcatttaccatggtccatggtcttacccatgggggactctctcttcaagacggaattacattacccaagtttgtgagacgcggtaacctagaaggcccctttgtgattttacaaccagcagttggcccactgcacagactagtgggactattgcattccatcctctaagcaggcctgaggtccatgggaagccagagcatcagatagttgtgtgtttagcaagagaagagaacaaaaggaattgagtgatgctatgttttcatttgacacaacatacaatatgactgtcagactacagatagcttcatgctgctcagttctcatgataaggatagccttgcctgtggaactgaaactccaaggccttagctaccttccacctcctgcatctctttccacagtaggggtgccgtgtccctacattagaatacttgaaggccattaactaaaggcttcctttccctagacagagcttaaatggccactgccaacatctctttgtagcttttctttgtatatttttctacaactgaccactttttctacccataaacatgttaatattctctatcagttgaaagtcaagtcttgctgacctgtttttttttctttgtgtgtttaaatacctctgtattgatccattatgcatataacagagcaatattagttttctcatttctgagttctgtgggcatgcactttactgttgctcatacatgctgaaaatagtaggtgacagaattgagcagcaaggtgaatttatatgtcagaccaagaaggaaaatggaagctaaggtaagtcaacagattgtgttgtgcactatggtggattatttctaggtacccacaatatttattgcaagtctttataaggaaaaattaagaatcaaatcaaagtacttaatttgttcttttgtcagaatccacactaaatggtaaagcagggtattgagggccccttgggaaccgagaaaaagagctcaagaacagacattcctcttcgttggtgtcagacatgaatatttgaagtcatgtcaattcctataaagggagaagttggatgagacaacttgcagtgatggtggcccttgcttaaactctggctccctattatttatcttggcacttctggggtggctgtggagtctagaaagcatgtcttctttttagtgaactatcttccatctttgtaagagtggtcccttgggccttagaaacatatttggctactacatggctccgtggcaaaagttgtttgaattagagttagacaccgaatccaagcgtgccccatctcccaccccaaggtctcactttctgaaatttggaattcagagatatgcagtcattccttgcatgtggctagaactatgacaggtaaacctgagatctgtggacaaccatatttccctatgagaattgagaagcagagatagaagggggctgtattccctgagttcctgcccaccttctggttcccggcactggggggaactggctgcatctttgcctctgagtccttgagacactcttgggtccttctaatgatgccccttcaattttaacctagcctgatttggtttctgttacttagaactgaagagacttactaatacattctgtacttcaagccaataacacatgaataattgtcctcaaaaattagaattgatcttccacagggggttaggagatttgggtgaaataggtattatctttaatttaagtgtgttaggggtatttcaaaatcttcattaaattttccaaatccttcctgttgtgttgccagaatctttccttaggtaagagaccaatctgaggttggttccttgggattttgttaagctgggaaatcccttcagaatgacagaagccaggctatactacagtattaaaaggccaaagactgaaacattctaaaatgtagataattaagtttctcagaagcctcctcttccactcgcctgctatcccactctgctcctcaaactcacgaattttcaaaggtatttgaagctgaaatgggcctttgagttgttacttgatattttcatgcatgtcctgagattacggcctggagcttcgctttgagaataatagtcagaaacagctatttgattgtgtctttagactcctaagtaagttaacaggggagttaatgtcggtatgaaacagtttagctaaaatgtatcgccatatccttattgaagaccatttactactcattcagaaatatgttacaaagagagtatattgtcaatgaatcccactcatgaattgattggaaaatataatttattcctagataaaaagggagctctgattgtatgagaaagggcttcttcaggctttctgattcttattggttgtttcaaaatgtggaatttaataaggcacaaacaactaggaagagaatagggagtgacaggagagcagtaagtgtaatatacagcaagagaggggaatctatcaagcaggaacactttcttggtagagagagaaagcattgccttgtaaaatgggatagctttgaaggaatttcaagtctttatttttggccattcaactgtagactagggtttcacaggactcatgttaggtttagaggttatgaaatactgttttccaaatggaaatatatggcttgcaatctcaaagaaaaagaaaacagagggaaaggaatgcttctggccaaggcatcaataatcctgttattctgagatgtgtaaagatcacccacaggcagtagctcattctgctgcctttccaaccttcttatgtttttatttaaaaaccttcaattctattcagatatgtcataacaagctatgtcttggtgagcacacaggtttgtcattgagaaaggtcatataagacatgacttataagctacctctactgtgctctgcttttctccatctttgggaatctctgttttagttaggagagactaagttatgctgcagtaacaaatgagtccccagatcacagtggcctatcacaaagaaaggtttagttcttgctaatggtacatgcccaaaaaaagttgtcagggggctctgcttattgtagtcattcagatagacccaggctgagggagccactaacatcctctagttaccccagagcatgtgaacttttgggggagaaagattggagaattaaacatagttttttctttgacttaagaaatgaaacatgttactttttctcgtgccccactaagtagagctagtcacatgatcctgcccactcataagaggctgagatgtgcaggagtctctatgcttggggctaaaggagaactggatgaaacaagtagtatctgtaatagtatctgccatagttaaaccttctgaagactttgttcctgcataaaggctgccctgatcaattcagctcacagccataacatcttcttttgaagatctgttaacacttgtgtgtaccattcatttggcccttagccttcactgtctttgatatgtaaatgtctacttaagcatgtatgtgaatatgaatacatatttgcatctttgtgatgtctcctatatttgcttatgagtacactgaaaacagacaagctatattttttgcattacccatagtgctttccatattcagttagtgtgtaacaaatgtagtttatgggtaaacctgtgttcaaagggcaggaaatagataataagcaaatttgctgattttatttaatttattccacaaatacatagcagcttccttatgggagtgggtgttcataacaaattaactaagagtcctcacaaccttcctctggtcattaaaaagactattgtaggctcatgttgctgagggtcatgcatactttgtgatcgaatacattcaatttcctggcttctgctcatgtaggaggaaaagaaaaggaggcaaactgaagagaagggactcaatagttgaggcaaacaatttcaacagtcaatggggaaagaaaagaggaaaaatcacaggaacccagttattcatcaagcatgggaagggagactgcaataatggatgacttggtgcttgtgtgcaagaatcacagcctggatggtaagataattatatctcctgataattgtgagagagagcactaaatatgaaaagcagcttgtttcatctgtagacttgcccataggcaaagctggaaaaaccctctgggttaggtacctattgctgcataacaaattatgccaaaactcaactgcttaaaactgcagtaaacatttactatctcatgttattttggtgagttaggaatttgggacaggcttagtagagtggttctggctctatagtcatctgaaggcttgactggggctgtaagatccacttctaaggtaccacatgcctggcagcttgatggagagtattggtgggaggcctcagttcctccccatgtgggcctctccactggctgcttgagtaacttcatagaatggtgactggcttcctccagagacagccactcaagagagagaaaagggggaaagctttaaggactcatggctcttctaacctagccacagaagtcatacatttctgcagcatcttattgcttacacaggtcagccctcttccacatggaaaatgacttcacaagtgtgaataccaagaggcaaaactttaggggctgggtagcacatcctctacactttttgtggaaggagactcagattaaaaataagtatcaagtacattccttccagagaaaataaagagaagaagttatagagagaggaaccctcagtgtatttgtggcaggagtttggagcctttgggaacagatgacaggcatctctgattcagggcctccatctgagcagacttctttcctacttgttgaatgcttccccgagtcacttcttagctactgctagaacaggaggattttgaccatttaaaaaaaaatctacaattgtgtgcaaaagaaatcttatctccctctaagtaaaccccatctgtggaaaatttaactgtcttgtctacatactctacttctctaagcagcagtagagctacttaagaagaaatagatgtttctcaagtgttaaccctgaaaagatgttgtgccctctctttgcttcagccttgtcacagccccccatttagggaaaaatgagaataagcatgcctatctcacagggagtcatgagccttaagtagcataacagatatgaaatgcctagcacagagcccaagacagagctggggcctaatacaaactggctcctgtctccatagagagtctcttgatatagactctcttcatactaagaggaatgaaatacatacaaacgattaaaatgaaaattcagactcttataagtaagtctgaatttaattacataatcttaaaataaactgaattttattaggcatgtctaacaaatcactacttttatctaaataagtagttcatttttttcccaacagatattcctgcaacaatggacatgtctgatacatgtgctgaccagtacagtggccagtggcctcatatggctgttgaggacttgaaatggggctaatgggactgagaaaataaattttatttaattttaccttatttaaatttaaatagccacatataattagtggctaccacattcaacagcataggctaaaatgccaaatacctatgatttttttcaacgtcagacagaaatgggagaattttttagttttttggtcaacacatgcattccctcttaggtaccttatttatttattttgggggattctgatttgagcagttggtttgttgctactgagaaattttctcaaagccaacagatagatttattccctattttattttattatgatttatttctattttattgtgaactaaggcgattcagaagctgagcagtgtctctgtggttgtggatatgaagagctttgtagatagaagacagctggattcttacatgcatctaccctttatcctcatttccatagagttaatcgaatcttttagggttttgatgcattttcaaagggtgttttctaagttgtattaataagtgtcattatacttgtgggctatacactgcgttcctaagagtgtccactaatatcccctgaaacaatgttaaaaatgatatgtgagttgctgaagatgatttaccgtatcatgctcttgaataggttcttttgatagctttagaacgaaattcaaactgctgagaggttcaagtctttcaagtcaggacaacttaggctccaacctcatctgccacccctccttgccaatacagagccctgttccagaatatgccacaccatccaccttcttcctgaatctctggctttaccaatgcagtttcttctactggctcctccttttcttgatgaaggtattcatcccaaatctcagcccttctgtgaggcctcctcacccttctgcaatgagagacagcacaatgaagtgtttaaaaccatgggctctaaagttggacctcctgtgttaaaattccagctccaccacttaccgatagtaactttaggctggtttcttcacctgcctgtacctcagcttcttaatctgcaagatggtatgaatcatgggtctgtctctgctatggtttggctgtgtccccacccaaatctcatcttgaattgtacctaccataatccccacatgtcatgggagggacccagtgggtaggaggtaattgaatcatgggggcaggtttttcccatgctgttctcgtgattaagtctcatgagatctgatggttttataaagggcaattcttcttcacatgctctcttgcctgccaccatatgagatgtacctttgctcctccttcaccttctgccatgattatgaggtcttctcagccatgtggaactgtgagtccattaaacttctttttctttataaattatcccatctcgggtatttcttcatagcagtatgaaaatggactaatacagtctcataggcttgttgtgaagggaaatgagacaagtactcaatagatgtcagctgtaattattattctgtactcccttattcacacttttactgatagttttataatgatgatgttaatatctttattatgttctttgcattattgttgaatgtacatgtttctgtcctccacttccattatgagctgttataaacagaggataatacctatttcactactgtaacctcaatacctcacccagggaccatcaaagaggaggcactgtatgcatatttttaacaaatgaatgaaaatatgagtgcattaatttattccactaatgagcacccatcaagtgtttagtaaacctcagattgatgaatgataaggtgataaggcatactttaatacctattttcttaaaccctttcttttctgtgatatttaatgcataatggtttattagtcttctattactgtcataacaaactatgatgaatttagtgacttaaaacaacacacatttattatctggcagtcagaagcccaatacatgtctcactgggctaaaatcgaggtatcagcagcgctgtgtttcttactggagactgcagaaaaaccaacttccaaactcgttcaggttattgacagaatttggttctttgtggttgtaggactgaagtccctattttctttatgtctgttaggcagggctccacccttagctccctcaggcctctttctggtcctcacacagagcctcctacattttagaaccatcaatgattcatcttatctttttctttcttgtgtttggaatctgactttccctctgcagcatagctcctgcatcctcttctgctttctcactctgactgattcttccaccttccacttatgtttttacaacctcatgtgactagggtaggcatacccagataattcaagataaccttcctatgttaaagtcggttgactagtaaccttgatacatctgctaagtctcttcatggcagcacctaatctagtgtttaattggataaccagggacaggaatctttttttttttttttttgagagggagtttcactctgtcgcccaagctggagtgcaatggtgcagtcttggctcactgcaacctctgcctcccgggttcaagcaattctgctgccttagcctcccaagtagctgggattacaggcactcaccaccatgcctggctaagttttgtatttttagtagagacagggggtttcaccatattggccaggctggtcttcaacttctgacctcaagtgacccacctgcctcagcctcccaaagtgctggtattacaggcgtgagccaccatgcccggcccagggatgggaatcctgcagggacatctttagaagtctgcctattgcagtggtcaattcatgactgtgtttaagctgtttgaaaaatccatcatattttggctgggtgcaatggcccatgactgtaatcccaagcactttgggaggcctaggcaagagaattccttgaggccaggagtttgagaccagcctgggcaacaaagtgagaccgcgtctctataaaaaaaatacaaaaattagctgggcatggtggtgcaaacctatagtcctagctagtacggatgatcacttgagcccaggagttcaaggctgcagtgaactatgatctcactgccgcactccagcctgggcaatagaacaagacactgtcttaaaaaacaaaaacaaaaacaaaaacaaaaaactccatatttttatttacctttcatctctatgagggcagggattatatctgttttatttaccaagttatattcagcccaatgcttatctcatggtagatattctataagcatttgttagacacattgaaattcctagacccagatatttgggtttgtttttgttttaatcattttattctaggttaccaaagtgatcaaaccggcctttttttttttttttttgagaccgagtcttggtctgttgcccagtgcagtggcgcgatctcagctcactgcaagctccacctcacgggttcacgccattctcctgcctcagcctccctagtagctgggactacacaaactagcttttttaaaaaaggattatatttattttggttcttactttgttttttggtctcctataactttgagtttactgcttgatcccttaccttttcttaaattttagtgtcatttcacttttttctcctaaaaaaactgggctggacctcttttggaactttgagtccttttgcagtgatttcaaggggaacatgagagactagactatcaatatcctatgatgatgatgatagcaatgatggtgatgttttggccagtgtgggctgctggttctcaatcggaggcgattttgcaggtgacatttggcaatgtcaggagacatttttggttgtcatggctactggagaggttactactggcatctagcaggatagaggccagggatgctgctcaacaccctacaatgcataggacagccctccataacaaagaattctgtagtccaaaatatcagtagtgcccaggctgagaaaccctgaagtaggctaactgctgtaatgagcttcgtcaaaacccagtagcttaactgaaaaaaaaaagaaagatatatgatatgatatatcatatgtatcatatatgatatgatatatcatatatatcatatatatcatatatgatatgatatgatatatcatatatctatatatatcatatatgatatgatatacatgtatatagatcatatatacatatatcatatatgcacatatagtatatatgtgtatatatgatatctgatatatatcacgtgcatcatatatacacatgatatagatgacgtgggtcatataaccttgataataggataaatggttcatatatacgcataatatgggcgaaatgtttcatatatacatgatatatgggtatatatgtttcatataaccataataaagacgcatatgtgtctcatatacacattatataatagatatgttgcttatatacccgatatatatgagacatatggatcatatatacctgatatatgtgatacatatgtatcatatatacatatatatgtacatatgtatcatatatatacatatgatgtatgtcatatatacatatgatgtatgtcatgtatacatatgatgtatgtcatgtatacatatgatgtatctcatgtatacatatgatgtatctcatgtatacatatgatgtatctcatgtatacatatgatgtatctcatgtataccatatatacatatgatgtatctcatgtataccatatgtatatatatcaggatatatcatatatatatcatatatcagatatatcatatatatatcatatatcagatatatcatatatatgtatctttttgtttttttgagatgtagtcccacttcttcaccatgctggagtgcaatggcacaatctcggctcactggaacctccgcctcccaggttcaagcaattctcctacctcagtctccccagtagctgggattacaggcacgtgccaccacacctggctaatttttgtagttttagtagagacagggtttcaccatgttggccaggctggtcttgagctcctgacctcaagtgatccacccacctcagcttcccaaagggctgggattacaggcatgagccaccgtgctcggcaaaaaaaaaaaaaaaaaaaaaaaaaaaaaaatcgtattcagaatccactgcaaatgtttctgaagggtggctctcctaggaggttcttaggtaggatccaggttctttccatcctgtagctctaaattctttaacaagtagccttcagggtgcctgagaagggaaaaggagagtgaggagtagagtctagaggatttctgtaggcccatccaggaaagggtgtacatcacttctgccacattccattgatcggaactcagtcatttggacccacgtaactccactgaagcttggaaatgcggtctacctgtgtgcatgggtggaaatgcggtctacctgtgcacatgggtgaatactaataatctctgctagaaaaactgaaaacagcagcaaaacaatattaataccattaacatctaacatttattaagctcttctgtgcacgcatagtaatttacctgatatagctgagactcaaaaaggttgaataccttgcctaagtttatgaagaggtctatgaggagcccagagatgaacacaggtctgcttcgttccaaaaaacatgtgcttaaccactattcgatactcctattgggataggaattgaatactgctcttagtggggctttatttttatgaaatagaaacaaaagctgtaaataccacaaatgcagaatgttctagacttccagagccgctaaaacaattcttcctaaagagctggtgaaatcctttttagggaatatcaatatacagattgcattccaagtttttgtctggatcacagatgaatagacagggagagatgaatgtcctgggggaacactatcatggtgctttttaaatcatcctgttgcacttaggcattgcagcctgtgattatatatatttcagataagttttctgtagtccagagggattgctagccaaggtaatgagcactgctaggaatcttgacagcaaactgtaaatggtctcaatgccacagactttcaagaaactgggaccttcttgaagtgaatggctatttctgtcctatttaagtaattcattctcatctgtctccgattagtggtgagccttgtgtcatatgtgatagttataataaggcacttaccaaaacttccttttaagggtggaaggcattttgggtttgattgtcatggagcaaggtagaagaaagaagccctcacttcataaaaggccacactggtagacaaagcaatatgaaggggtgtaatatgtgaacagagttcacaatcttcctttagaatgaaagtgcagcggtttcctggaatgttttaatcgagttttcagggtctgaaagctgaccatacatgtgatggttctgaatgctgctcccttcattatcggcctctgctttgaccatgttatagcacacaattctcagtgagttctctattttgtgccattgaaatgggaacttctaattttactgcttaaaagtgtgtttttctttttagtaaaatcaagcctgttcttttttcctgtctccttctctgtggaatactgcctttctctattcatttgcttacaagagaatctgcactatcatactggttagatctttaagtactcattaagtgttcattgcatacacaccatgtgtcaagcactgtgctaggcactgggctggagtagtgaccaagacaaacatggacctacctgatcataaggaagtcatgtgctcaggtgagcactagtactttttgccacaaataacaaaacaataacacccatagtaatactacctaacaattgttaagctcttataggctagtgatccagttgatttatttttccttttaagagatggaatcttaaaaagcccaggctggagtgtagaggcatgattatggctcactgcagccttgaactcctgggctcagttgatcctcctgcctcagcctcccaagtaactagaactacaggcatacatcaccatatccacctattttttcattttttgtagagatggagtcttgctttgttgcccaggctggtcttgaactcctggcctgaagtgatcctcccactttggcatcccaaagttgggattacaggcatgagccaccaggcccaggaccagttgtgtttatattctgtctcagatgttgatgggcagaacaataaagaactctttataacatttattgcatgctaactctgtggcaagcactgggatgaaagctttccatgtattatctaatttaatcctcacaaacccttattgaaaagcttttgtcattatccccattttaaagatgaggaaactaaggtttatagggattagagggattatatcacctcacacagctgataagtagtgaagctgggctgtcaaatgctgtctgataccttagcttgtgctctaaactcagttgtacaaaatcatggaacatgatagggaggacactgattttcctttgatgtctaagtaaaatagtaaaaggtataccccagccattaaaccactctgagtaacttttttctattcttattattttaccatgagtctgtttttcatacatgcccttgaactattagaatcccccctcccaagatggcatccacacaatggtaaattacacctggccatttattgtatgtatgttcaggcttgttacacatcagaaagagacagacatgatccttgcctttatggatcttacaatttaaaggagaagagagtcaatcaatcacaagtgtgatgagtattataaaaaaggaagctgagtgctatggcaagtatatcacattgggaaggtaacctggttttggagtggggcatggttgtggataatctccatgtggagtgaagtacaatctcagaagccaagtatgagtaggcattagaccagtgaagaggaagtccaggatgttacatggttttgaggcctgagagagtacaatagggtccacgcactgaagaagttgtcaggtgggagcatagagaaggcagagtgtggtgggagataaagacagtgaggcaggcagggatggacaatgaaggccttgtggattgtgacaaggttttaggatcttatcatggaagcagtagtgagccactgaagatctctgggcagagtgggaacaggaaatatttggatctttaaaagatcactttgaagattatatttccaggggtcatttctgtggttcattacttaaaggagtttccccaagtgtgtagagcactggaaaccacaggaagatatgcaatgttctctcccgagcacgaagctcgttcttggtgttgcttcattgcaactgccatttgccattgatcattgtttttttcttcctttggggagattaagaggaagaggacacagtctgagtgatcttcattttaaaaaaaatctctttggctgcagtatgcaaaaggagttaaactgaggaaaactggaagccttggagtagggttattgccattctgctattctgagatttggtgaatcaaccccctttcccccccagatctgtgccttttgcaattttgaagacgtatgtcagggctcaccccacctctgtctagcaagaagcaactttatctgcctcgaatgcattaccattttggttgatggcctctgaacgttttccatcacagtcttctgcctctcctccatattctttgctaaataacatgttgggaatggtctccttgtcttccacatcaaataatttaactgaaacaccatcataattacaacttaatttctctcattcaaacagaggtgatgcatcttatccccaaaataaaagcctccttaagcttacactctcacactccataacatgggtgtttacaaggttctttgcttttcttgcttgttgttacgtcttttgaattggattcaccctcattgtaactcattcatcttgtcagtcttaaattaagagttccttagggctggagagagggaaacatatatccttctaggctgtggaaagtacactacagaacactagaactttaagggagtcccacagggatacgacaatgaatgtagttttgtagtcactcttgaatatactcttggcccataacacatggaagatgatgttaagatagtatgtgagttctgaatgctttcagctgcctgtaacagaaaattaaagtgatagtgctgaaatcacagggatatttattactatgagaaaacaggaggtagaggatcccagggttagtttggcaactcagtaatatcataaaggacccagtgtctttcatactcaggctctttcctcttttggctattgcctcatggtcacaagacggcttctacagctctaagcacaaagcgttaacatgacagcatctaaaacaggaaagaagaggcatatgaagaaaaggctttctcctcttgcaactatgactttttaccaaaggtgaaaaatctttcatgagtccccccagtgtatgtccactcattggttagatctaggtcacatgcctactactgaataccaatcaatggcaaaagaacatagtatcgccatgattgggttagaccagtcattattcattatctaaggctaagcacatgctgcccgtcagaatttgggttttgttatcagagaagaaggagaatacattttgtcacatttggattaagaacagaaaaccataacacttctaaatggtgttctaagaggaataccatagtaggaaatttcagagatgaggaaatgaaagcaaatgagatgactgactccctagttccctggcacaaaagagatcttgagtaattccctgaacctccctagataggaagaggcacttagccatgtctgctcaccacaaatacttgtgtatggtaggcattggttgttcccttcctaagatccactttacatccattctttcctaacagaaatctgattttgtttggagcagcaatgctcagctcatatccagcttcccacactctcttacagttaggaaagactgtatgacccatttgtggctgggcagatgtatgtggaagtcactggatggaactttctggaaagcttttagaaagagactgacttggctggcatcctctttcccctttgcctttccccctcttcttgcctagggagaatgtgtcaaacttggagatccagcagccgtctatgacaatgaaagtgaaagcctcactgaaggacagcagaggaaaaaaaaaaaaaaaaaatagaagtaggctggggcattcatgacaccatgagataccagctcagtgtcagattataccttcagacatcttgttgcatgaaaaacaaaacaaaatatgcacacatgcatatccggaaaagaaagctttctgtgtttaaatcactgttgggctgttggttagctagattgcaattaatgcatctgaaagcaatcccaagtgatacaccttccaaagctaaaaacactgaataagacagtgaagatgcatttaagtattactaagtgccaaaggaaatgtaggaagctttgtatgagaaaagttagggaaagagaggaagtgaaaaatacaattggtctgatgtggccatgaaatgtcctggtgttggaacactttgagcttactctatcagtgttaccatatgcttgtgggatatgatacccaggtggccagatgatttggaggaaccacaacccaagaagtttacattctagtcccactggtgaatctgaacatttacacttccttcaacctgggtattatgttttaggcatttggatattatgcttacttttgtttggtgtttacggtttttcacagtaaggtaatcaggactcaaattaagttttacatgaagacatctttgcagtgttactaaggacaccaaagggactatgtttaacaaatcttgggaaaaatcaggtgtttttgtgtatgtggaacatttaaatacattgcagttgaatgttaatgcaaaaaaataaagctttattgttggtgattacactgcaaagaaaaagagtacttatgtttctttcaggatttgcaggtttactaactagcggatcattagataaaagatgaaatgaagcagagatcacaactgccattaagtcagctggcactttatcttaaaggcagaattgcactaaaatacaccagatatcctcaaatacaaaggtgaggtttgcttccccctgaatttattatccctcagaagagacgaccttgctttatatttgggtcctttcaaatactgctttaggaagtcacagtgggctgaagtggcttcacccaaggtttgttttgggtgctcgtgaaggtcatctgctaggatccataaaagaggagcagggaaattgaacacagttagtcatgattccaggggctatgacttcacaattccaactattggatgttgttccaaacagcgattttgaaaagtctatttaaaaagcaatacaagagacaaatacatcatagacatcaaaatatatacctgttcaaagaaatatttttatttagaagaaaaagctgctaatattatataaataggtacttgtgccttcagagacaactttcagaaacaccatcatacatgattcaaggagtgtcctgttttgaaccaagggaagaaaactcagttggagttttgtggaaaactctggaaaactcagttggagggctaaaaaggaggctcttatatggtggagatgctcacatcagaatttgaataaaccatgtgttgagatgctcacataagaatttgagtaaagtacatgtttttaagtatccaattaaattaatgaaataaaaagtataggtagatatttaactatgtgtttcatatccctatatgtttatatgtataagctgtccattctgccttttgaaatttgtttaatatttttactgaaaaaatggaatatttctttttttgaaaaaatcttaatttttaggggatagggtctcactatgctgcttaggcttgtctcaaactcctggtttcaagcagccttcccactttggcctcccaaagtactgagattacagaggaatatttctttttttcaagactgccttatatttggcattagtaactactcttttcagtttattctcactatatcctttcttgatacattaaattttaatataatatacaaagttttaagtgcctaaaagagttctagagcgagtgatggaatgacatatggcagctcatgaaaaaatattacatacttcataaagagacatgcagttaggtgccagactgatgaagaaagttgttcatctttggatttgggtttgggtttaatacttgcatttgggtttttatttgggtttaatatttgtattagtcagggttctccagagaaacagaatcagtaggatgtgtgtatccatatgtatagaaagagatttattatgagaagttggctcttgtgactatggaggctggcaagtccccagatctggcattggcaagctagggacccaggagacccaatggtgtagtttctgtccaatgatcaacaggcttgagacccaggaagagccagtgtttcagttagagtccaaaggcaggacacaatcagtgtcccagctgaagactatcaggtaagaggagtttcctctttcttgcatgagggtcagcttttttttgtcctaatcaagccttcagctgattggatgaagtccacacacattagggagggcaattgctttactgcatctgttgatttaaatattaaaagtgtgtccaaagcaccctcacagccatactcggaataaagttcgaccaaatatctgggcacctcatggcccagtcaagttgatacataaaatttatcatcgtgacacttatagaaatgtggactttgctttttttcttttttcaggatttatatcaaggctactttcaaaaaatatgtataaaatattacaagtttaactataccatagaaagactcagtactggcttgttttattttgattttttaaattgaacttgtaaggcaattcttgagggaacttccctgaatataataatctgtctatattgttgatagactgcattaatggggtctatgtgacatgataaagttctgtggggctggcatcttttgttttttgagaaagactttatgacataaatgagtgatcttaaatataattgagttgcaccttgtgtgcattgaacttttgccaatttaaccacacagaattggccaaaaaagtgagagtaggaagtactgatgtaaataatataggtcattctgttagacgttcccctcaatgaatatatgcctcttagaaaatgtgagatgggttctgggagtcattctcattttcctgaacctcttagtgtgagcatcttagtgctgagtgagattccagtgttgacattttctgttatatatgaaaaaatatatgcctagtaaattcacaccaatgacttcatctgatccttgatcaaagaaggatctgttctaatgctagaggaaagcctctattggacctcctgagaatctgtaccatattttattctgtgggggaattaaagagatttccaagagactttctaagctctgacttaaaaactatcttcaatttaagatgccactcagctatctttggtctgggattgtggctttcttaacagtaaatgttaactactaatgttttcaagagcattataattttaggtttgctcttttaaaagagtatttctcctccctcctcctggagatgatctggaatgcaaatgtgagctttcctttgtgtatgtgtgtatatgggagtgagtgtaaaaggtttctttgaaaccatccctgtgggtaagaaaggcatctagccactctcttataggtatgtggggacattcacttagctgtgtgccttataccagggtttactgaaaaataccaataaggtatactgaataagatgctattcaaagtaatgagtaggttatataaattctgcttagagaaaagaaatttataagataaagacacctcatctgaaagtgtgaaagccttcagtatagcagctggtgttctgggtcagctgaggagaggagctttataaaggaattcattggacctggttggccataggacatggcaggtgtgcatctactttggacaggcacctggctctggataaacaagtggtgagcacaatacctttttgtcttcatggtgttttaataagtgtgtttgggaaggaggtagggatgggcaacaagcaaataaagaagaaagtaatgggatgcaatgagagctattaacaaaataaaagattaatgtaatggagtgagttggtgggaatgaggagtctgctttagactggatagtcagggaaggcctctctgaagagataacattagagctgagaccttagtgatttaaagatgcagagcatgagagagagagagagagagagagagagagagagagagagagagaagtgcagacacaaaggccctaacatggaaatggcaacaaagtaccacccactttattattagttgcacctgtgcccaataccttccagtgtagaacactgataaaggtaggtactttagattggatagtcagcgaaggcctctctgaagagataagattagagctggcagaggtcttaaatgggacttcctaaatgccccctcaagcaaatagcatgcttaagaattctgaatgggggcctgtgaggggatggggaagaatgaaagtgttgagataaaaacaagaatccctgacatcgcctgggctcatggatgctattgcctcaaattagaaagaaggcaggaaagagggaaggaaatagttagcctgacctgagagattagagttttttcaacttagaagagaagaagtagaagtgggggaagtcacgtttattgtatagtgaccatgccacttagtaaataagactccatatgcttgaatttgatcaattacattaggaattgctccttggagagacatgggatatagggagagagagagaaagcatggcaagcctattttctacctattttcatacctattttaagggtgaagactccaagtgcataggtaagaaatttgcccaacaggtaaatggcagaaatggcatttagaagcaggtctgtttgataccaaagtaaatcagactgctctttttagagatcagatcggaatcaatcaatttttcattctcatgctctgaaagaatttacttatcttccaaagtaaaaacctcacttactctgttggatcggagctaattattttcatggtttcatttagatatttggctttatttttgaaatcataataattttatatatatatatatatatatatttcatttttgtattaacaaaagtcctgtagggaaatgacaattttattctctttgggttgagaggtagatgtctcattgttcagtctgttcctatggaaagaattgacaacaatcctaaatggtataatcacacatctacgttggtacacggaagggccaaaagccaaatagtattccttgtcaaatttctttgctttcattctcattctctctgtctctccctctctcccttctcttccctttcttcccagtctcttagcaaatatctacttcttgttcttcccttatataaaaggttaacatgtgaaaatctagttataattacatggttttccctttcaggaaatggttttgcaactattgataaaaatattcagtctgcatggataactatagtaaatatactttaaaaggaatgtattttctgaaatagaggctcataatgttatatccaaatttataactgattacctattcctttggtttcaaatctatgtttgtccctagttttcaatttcaattttaaagtgtttagtaacttctcaagtatgtagacatggaattgggtggtatttgggagtaacatctacttaaggtcagcttgatgagctttcttggaaaaaaaatccattatatacaaaattttaactcataacaataaaaaatagctaccagtttgaatgcttaccacctgctagacattgtgtatattttacaaagattacctcatttcatctttataacaatatggtgaggtaagtatctatattcttatttttcagataaggaaatcaaagctcaggaaagttaaatgacttactctaggttgtattcaaattaagtgccagaggctggatttgaacccatatctgtctgactccaaagcctggacctccaattttctgaaaacactgagttgaaatcttcaggggttgaagggtggccatctttgaagttttgggcatgggttgaaagaatgtgctgtaactctagtcatcatcttgcaaagtgataaaacctacagctgagatctgagacctggagccatgactttccaaaagtctaaaaatctccttttagttaaaattgcaaaaaaattatcttaaaaagtacaatttgatagtaaagttctcaatagtttctaaatgaaaacccctgtaaatgtagaagaactgtgcttaaggcccaggagggcatagaaatgaaaggtagaaataaaagagtttcaacttaaaggaaataaaagaaagctaaaccatcttatgaaaaataattggaagcagatttcaataaaggaagagggatggaaaatagactaatgccaaaggggaactgaagacaatgatgtctggattcagtcatttgggagctgcctagaggccacagccattggcactccataaatttgtgatggtatgcagcaataagtaggaagtgcaaactaggggaaagaggaaaaggaagtgactgagttgcattgcaccataaattcaggagtaacatattctctctacatatgtcaaggataaaattgtgcttcaagttctttatttcatttggcatactttattcccataaagaaataccctggagggagttcatacggggaccaaaaaaaatgagtgtatcacagaaatgtcgactaataggaaaattcatttgactttccttcttcctgtggttttaccacaggcagaaatttcaaggtaaggaagaagaaaagaagaaagggaggaaggaaaggagaagggacggaaaaggattccagtttctgaatttttgtggcatcctactgtaagtggcagtaaaaggggcttgtgggtgtattttccaagataagaatgaatggataacatgagttcatgtgctttcctgggagagttgatagggatgctttttttggaaaaggggatctcctcatttgatagccctgtgatttgagcctgatgtgctgttaaggcttgggaaaggtagccccagtcaggggtccaatcttctgcaatgtgatccaagcataaagaagtgcttctgtgtgcagtggattcaccatatgcccacttaggaacccagcatcaggtgtagatcttcaccatgcctaaaatgtgcaagcaacagctgttcagaggtaccctaactggaaatgccatcttggaaagaaaaggtgcaggttgtcatattcttctctacaggattttaaagagcaatgtgtttgtgggtctgatgaaacaagagttagattaaaatgtagcaccctattgagtatctgctctggaccagaccctgtggatgatgcttttgcttatgaaataaggttatcagccaggctcattggctcatgcctttaatcctggcactttgggaggccaaggtgggtggatcacctgaggtcaggagttcaagaccagcctggccaatatggtgaaaccttgtttctactaaaaatacaaaaattagctgggctttgtggtgcatacctgtaatcccagctactcgggagcctgaggcaggagaattgcttgaacctgggaggcggaggttgcagtgagctgagatcatgccactgcactccaggctgggcgacagagcaagactccatctcaaagaaaaaaaaaaagaaagattatgttacttaatcttaacaatgacaaatacatccattaatgcatatgtccaagttatgaaatgtgaatattaaaacagtggaataagccctgttggagggtttacagctttgcacttcatcacctacctgataaaaactcagaggtggagatttgctagtttcttaaagaagaggttgtttgaataccctaatatctgtaggtggacttttctttgcttccttctttattctaactcaactgattttctcaaatattcactgtcagtcttgaatacacaaagcaatgtaacttgcaccctacaggtgattaaagtgatcttcaatggtaagtttgactatatgcaacatttaccttaggctccggctttagaactcaaatcctctcccttaggatatgactttgctatatttgtgtataggttatttagatccttgggaatgtcttgaagtttgtgtttcctacatacctaaatgtgtttctaactcctacattctctcttattgtttcacatatgctcttgctttgtggtacatcttttttagagacagatatcatttacaaatatataatacattaggcagaagggtgataaccttttaatttagcttcaggttttaaaattttatgtattgccttaagaatagggcatgctgtattatgtagtgttgctctctaacaatgtagctaagctgttaaagacaagcagagccctcagattccagctgaggttcagtccacgtttttctgggcaatctatctatatagaaaaggaataaagccgtaagtgcttatgactttcttaataatcttatgcaagaggcttatcatacaagttacaaggttttcttttatttttctctgatacctttgtttagatatgttgccaatggtttaaaactgcattactatgtatcagccattacctcttatgtatttgacactgacagacattttcactccaatgttttcatataaatttattaattactcaagcagtctttgaggttgtcccagacatcgacctgtgagttaatggtgaaatttcatttacagcaggctgagagctcttgaaaatttatgggatgatcaagtttatttctggggtatgtgtgtttatgacatgtaaaggtaactgaagtctgcatatgaaataatcagcatcagaattggaggatatttgtataacctaaataaattctggggccccatgtggttcaatcttaagatagcatcgcaagtgaaataattaaaaaataaatctaaattttatttttacctctccaagaattttgaaaactattttatgcattacacatggcaactgtccttaaaattccctgttatcttttttcttcctggtgatctttctctctgtgctctgctcagaagccagacgttgtctctctcttaatcatttacccttaagtagctatggtagttctattaagtctgcagccttagttttttggtttttttgtttgtttgtttgtttgtttttagtttactcctacctttctaattatttttttcttattgttcacataattctgcatcacaaaaaaaattttattttttaagaaagtggattaaggggaaaggctaaaaaaattaatttgtggggaaatggaaagcttggaacactaacatttttacaaaatttgcccttaatatatttaaacattgattaaatacaattcttattaaattcattgttagaaccaagcttggagtaaagaattatgaattcctttgaaaataaacttcatattcagaatgaatttaataaatagaagtagtagaagccaaaaataatgggatttattaatttagaacaaatctagagtagactatcagaaaaaatccagcagatcacatgattgtaacatagttagtgaataaatatgcaccctcagggaaaatgatcagggggtcataggggaccaagaataataaggcagctatgtagcgctaatgaagagcaagctgaattcagaaataaatcaagaaaatgaaaaacattttctttacttcatattaaacctgtatagacatttctagttcttgtcctgatttgaaagggattcagaaaaatttcaagtaagtttggaagattgtcacaaatatgattaattacatatgaaaggaaaaagccaaagtgtgatttttatgagaagaaaaccattagctacctttgcactttcacttgtggcattaagaaagaattgatttatataatagtgaagcatatttggttagtcattggggaaaattatcacatgaaattaagtggcagaaatttttttttaaaaaaatagaaaatgtgttgaatcacattctggggaagtcttaggaaacaggttttatcatcgggcctttacaactgtggaggcaggaaaaagaatgctgtgggtttatgtgtgtagggttttttcctgccctagagtcaatgattttatgaaatacctaagaaaatctattccccaggattgcacaaaatgccttcattcctcttgttgatatacatgatttatttcttgtttctggaacttactacttctgcttttcaccaaaattttaatcggttacctaatcaataaacttttctcctgtttgtctcatttaacatttgtccaaatcagaatgggtgaataagattctactaaacactatagtatgcctttgtattatttataaggtatttgctaagctctgtatttccttggagagagttaactttttccaacaaaattatattaaatcataagtgctcttgccctattttgaaatcagtggcatgtctttaagatatatatccaagctctatttttcactgctatttctccctcttgattaccagaaatacatacatgcatgcttgccttacccctagagtgtcaggattgaggtagcctgtaaattaactttatttcttagaaatatgcagcaatcatatactctacccagagcccacctatagttacctgcgttggacaagaagagaaggatgaacactaggtcattctctcctgcttatcatggtgtgctcgtgtctttcattaacacagagaaaaagaaattcatgataggctttccttcatttcatttcaagcaagtataggatttttactatgcttgcaagaaattatatacatatttggagaagcagcctgtgatatcaataggtaagttttctagttatccaggtgtccctgctgttagccttttaaatttcactttgggagcaaatgctcaaaagtttcaaaatccagcacaagaacacatagactgaaggaatgttcttctggttgctttagagggcaaagtatttccaagacatgcaaggctcttttggttaggatcatagaaatgataattttgtctctaggtggcatttataagaaactatttatagtggtggaagtctctctctgactgtgtttttatttagcatttttctaaaagatagatttgtatcttgatattattggaacataataaggtacttatttcacttctcttttgtgagaaaaaaacctgtcgtatgagactttccagcctctggaaccacctgaatgcctcggtcagcttcatttcagccccaaagtcagaaagaattctctgtggttctcctttttagcttgtggttcccagtcctaactcaccttcacattgcctggggagtttttaaactccattcctacgtgaattttaaactgtattcctttctttcttactttctgcagacagacctgatgcacagcctgctgtggaatgcctcaccacaggacactcagatgcaaataaatctttggtatatctatgatagattatatctatctgatatatcagaaagatgcctggtagatttgaccagtctggagataagaatagtggggaaccctaagtacttaatagcacccctgacaattttaaggggtacttctataaagaaccatgtcttcccagctgggatggatagcacagtagtacgggtgatcctctgctcctaaaccacaggactgtgtgtaaaatcctttggatagcttaagctaatgatttctcctttagatatcttgcccacattaacttgaatgatcacaccttaatcttatgtggactttcattttttaaaggcctgtctcctttgcctagcaagggaaaaaaaaaaaaaaaaaaatatatatatatatatacatatatatatatgtatatatatatacactcatttaatttctctaggttctttaataagcttaagtaactttcttatctgctatttgaatatcaaagatgttttaaatataaaaaatatcacatataccttgcgaagaagcctatgggtccttggctgcctagttgataaaatatctcaggttatgaaaagtgttagcaatgagtgaatgaaagagcatgttttagggtgtcatttgggctaagctagaaaagaagtcacactctgagttctttttttttttctggtgggagatcaatactgtctagacatggtctcattaggagtttacattgactaaggcagactcggataacagtgggactgttggtgagatatttgtgttgctcattactacagagaactccagattcactggtgtcaattctgtgcattccagcatccttctactcaactgtagggttatccgtgagggcaggatatgcccacccatgactttgtcaagattctgaagcctagaagttttgggaactactctctaggatgtcctaacatgcttgatgacagttgtgtaggccctcggagcgtccttggagcactggaattccctatggtcttccaaacataaaaccagagatgtagttcgattcacatctaaaggcctcagcccatccctgagagccagaaactttcctgacatacagcctgcctattaatttctgcaaataacatcttcatgtatggaaatatcagaaatttttttttaatatttagtagccttctcagttctaagacatttttgtccatttgtatatatttttttaaattgaggaactttatgattcctcacctaggaccagaacttaaaagccctgcatcctttcccttaggcattcagactgctagatatgctgctctgcatggaattttaaatccttcatttgcggtttcttgttggcattttgcaagggactgaagcaatgtctgagccactagaggccagaggtggcccagcccaaccaggtttctgacagtaaaataaatatctgttatttgtccagtgtcttcacttttcaactttgggcaagataagcatagacattgagaaataatgctgtttatacaaaggattgctcatgataaaagatctctttctgggaatttaagttttccggtacattagcattattgattatttattctctttccacatagtctacagatgattttagaatcccaagactattattctcccttgtctagtgtaattaccagaacagggaataatctaattaaaagacaacaaggatgggttctaattgttctaataaattatgttaacacacagtgcatgccgttacttttcaacaggaatttatttaacacattgacagcttgtcctttactgccacaatcttagattccatttcttctaaacaagacaacttacaatagggtagttaaatattcagaaatctgttggattggtaagagaatctaaagatctatgtggtaaatacagatgaagaattggattttgggttctccagataaaataatgacccgaaacagaagaggagaaaataaagaggaatagagtctaaagtaaaaatcaaaaacagactgttgtaataagctaataaacttttcatttgcttttctattatcaagcaaaatgtacatgataagatgatactaactcatataattgcatttgcttaattttagacattttacacaaatctgttagacaccacattgaaaactgcatatatgagatggtgccttcaataaagtcatgtcatgatatgggcaaaacttcattcattactgataggccatatgtttttaacagaaaacgtcagtctccttgcttatttgaacataattcagatataatttgtcacataattataagagaaagccctcaaggcaatacagaaaaagaagaatgtggggagaaaataaaatctatgtagagaatgaaggaaagtgtacaatcaattctaaataaacacagacactctttacctatttcagacaagcagattcccaggttggcttgtgttattgtccttgatataaaaacctttgacatttaattaacaagtttacaggtaagtagggatctttctcacaaggaaaactggggactttgtaggaataacttttcacctctgcagaattgattcattcacatgtcaagttcatcgcagaatatggggctggcaaacatgcggactgtagttcatattcttaaagcccacttattttagaacagcagtcatagagagaaaacaaaaaacaaaagatacatcatgaaagatgtgaaaattagaagaaaaatcatctttattagcaaaggaatgcctcccaatttcctccctatctgcatatatcctggcctgcctgggtgaggatttttggctccttcctcgctgtctattgtattctagttcacaccttcatttctgatgggccactttcatgcttgtttttctgtttttaaaaatgtgtcatttctttcaaggcctttaggctctgaagatatctttcctctaaagaggactgagtgctagagagctcctcacggagctgaaggaccctcgccaccgggtctaaataagatcaagtcccctctgagaggcagcatgaaggtggcatgcagttttaaaaaaaaaatagttggactgtaaaggaaataaagacgtagttaaataagcccttatgttatcacatagacactttttattcttctgtttatttttttctgtgtttttctgaaactacttttcaccagaagtgcgatagcagttatgtaaatgcagaaatctattccatttcatgtctagagccaactctagatgcttctaagggggtggggtgagctatgtggctgggcagagggtcagcataataaacgggagagggagagggacaacaaatgagctgcagtccctagaggtctttggggactgggcatttctggggcatcgaatgtgaacttgacatactgtatgtaaatctgatttttttttctcagccactgtcattggaaaattttcatttagtaaataatgcaaaatatacattaagaaatgttaatgttttgacagacactgacaaatgccagggaatcagaagcaacaggaaagctgaagcacttcactgaatgtgctgccatctagccatgatctcattgcatgctgcttcactcactggtcacagagacactgaagtcattcggcaggcaggatggagtgtgtgtaaaatggagtgtagaaggcagggaatcggctgagtcttttacttttattggccattaacacatcctaccagtccataaactaaattttgatacgtattagactaaagataatgttaataattcatggaaaagctactttaaaaagagtgttatagtagcaatcattgctttaaatattacactcaccattttcgtctgttcggtagctcctcgtggtacacaggataaagtttactccttagtagaggatgaggccctctagcccagcatccttcccttagctgtcttttctactgcatctcttgcttgttccaatgggtgttctatacctcagccaggcattcagtctcacagattctcaaatgtaccatcttttccgcttttctcagggctttcgtgctgggttccccttcacccaggaagtccttttactacctaactttcagaacctggttcacacatctctgagaagttttcactgattctctcaagcagtgctgattctctctgtgtgtcagcatcgtgacaagtacatacctgcatttttgcacttatcacacattattgtaattatttttcacatgtttattttttctgccagaatcagtttcttgtagcctggtgacatttaaattcgataggatccggtttattgtatatttttttagctcttcctacatgtattatttttgagtttctgctgagactcaggaacttaaagctttcaaagtcctgaatgcagataacaatcaacagtcaagccagtatcctattgcctgtgaaaatatcctcaggaataaaggggaagtaaaaatattatcagatgaaggaaaactaagagaatttgtgttttttgtttgtttgtttgtttgtttttgtttttgtttttgagacggagtcttgctctgtcgcccaggctggagtgcggtggcgcgatctcgactcactgcaagctctgcctcccgggttcaagcgattctcctgcctcagcctcctgagtcgctgggactacaggcgcccaccaccacgcccggctaattttttgtattttagtagagacgggtttcaccgtgttgcccaggttcgtcgcgaactcctgagctcaggcaatccgcctgcctcggcttcccaaagtgctgggattacaggcgtgagccaccacgcccagccggaaaactaaaagaatttgcataattgcatcactgcactctccagcctggatgacacggtgagactctgcctcgaaagaaaagaaaagagttatctaattggaaagaagacaattaaaaatggatctcttcaacatcagaaaggaagaaaaaaacatagcaaaaacatttgtactcttgagagctctaattgtgtttgaagtttgaagcaaaaattgcaatattctgatgtggatgtaaatgcatgtaaaggaagtatttaaaataattatattataaatggggaagataaagggatgcaaagtgcggagatagggtttctatatgttactcaaactggtaaaatgatgacaccagtaaactgtttagttataaatatataaagtaatacctagagaaacctttaaaaaattatatacagaaatgcactgaaagacactttagataaatcaaaacagaattccaaaaagtgttcaaatagcttataagaagtctgggcaaagaaaacagaaaaccacaaagagaacaaacagaaaataaacaaaaaataaaatggcagtgtaaattctaaaatatcaataattacattaaagttaaatggtctaaatataccacttataatacagggaagagattagcagaattgtttaaaaaatatgacccaactatattctgtctatgagaagctcactttcaatataacaatagacgaaagtaaaataatgggaaaagatgtatcatgcaaactttaatcaaaggaaaacaagagtagctggttctttgaaaaggttaataaaactgacagtctagcaagactgacaaagaaaagagaaaagacacaaattaccaatattgtaactaggcaacttaacttccaaatgcattttaaaacatttttttctcttctcttggttttcaagatacaaccttgaaaaactgcagaagccttttcctcagcctagaaataggctccacgtccctccctttttcaccatatatactcccttcacatttgtctaagtatatactagtatctaattactgtgccttcttagaagttccaggggctaatcttgagacaggcggaataagcttggagacccagctgcaaaattccagagattacttcaaagtggctagttaaaaacctggccatggctgctcaggaacttaaagcattcaaagtcctgaatgaaataataatcaacaatcaaagcagtgtcctacagcccgtgaaaatatcctcaggaataaaggggaagtaaagatattcccagatgtcttgactcaccatccaggtagactgagacccaagatagctaccagaacaagacacacagatattatacttagtacaattcttgcatgccttccttatcaagttttccctttttaaacccctgccttcccccaaaatcaaagtgattgctttgggcgggaatctgaccatttcccctttactggttttagtaaaatgactttctttctactagacctcactcttgttaactggactctgtaaacagtgggcatctggacctgcatttggttacaatatcaggaatgaaagaggagatatcactattgaccctgtagacatcaaaaggataataaagaaatgccatgaacaactctacacacataaatttgataacttagatgaaatgggccacttcctcaaaaacacaaattcctaccattcacctatcatgaaatagataatatttaaaagcccataactattaaaaattgaattaatcatttaaaaactccctgaaaataaatatttaggcccagatggcctcactggagaattttaccaaacatttaaagaataattaataggagttttatacagtctcttccagaaaataggagagaacacttcgcaattcattttaggaagctggtattactcagatatgaaaaacagaaaaaacagtgcaaaaaagagaaatatataccaataactgtcataaatagagacacaacaatcctgaacaaaatattaacaaacaggattcaggctaaaagaataatataccacgacgaaatggagtctagtccagcagtgcaaggctggttccaccactcctattcaacatagtgcaggaagttctaatcaatgcaataaggcaagaaagggaaatgaaaggcatacagatggaaagaaagaaaactgttaatatttgctgatgtcatgattttctacacagaaaacactaagtgatctacaaagacgaaaaaacacaaaaccaactcttaaaactagtaagtggctgggtgtagtgactgatgactgtcatcccaacacgatgggaggccgaggcaggtggattgctggagcctagttcaagaccagcctgggaaatatggagagacctcatctctcctcaacaacaacaaatgaaccaggcctggtggtgtatgcctgtcatcccagctacttaggaggctgaggcaggaggatggctggagctcaggaggttgaggctatagaaggttgtgtttgtgccaatacctgtgtgccactgcactccaacctgggtggcagagtgagaccctatctcaagcaaacaaatgaaaaactaataattgagttcattaaggtggcaggatatgagatagacatttaaattatcaattgtatttctttatactagcaatgaatctgtggacacaaattttaaaaatatagtacaatttgccttagctcaaaaatatgaaatacttatgtgaatccaataaaacatttataaaacttgtttgttgaaaactatataatgttgatgaaataaattttaaaaatgtaaataaatggagaaaaatgttgtgttcatgatttgaaagtcacagcgtagtaaagataccgatacttcccaaattgatatacaggtttaaagcagttcctatcaaaaatctcagtatgatttttttcatatatagatgacattattctaaaatttatacagaaacaaaggaactagagtagctaaaacaattttgaaaaagaaataataaagtgggagcaatcagtctacccagtttcaagaagtattgcatagttactatgtggctatccatggagtgacagaaacatagatcaacggaacagaataaagaacccttcttttagaaggagaaggcattagagaaaaatctttggaatctctggctagggaaagagttcttagatttcacataaacacaatccataacaggaaacaaatgatatattggtgatatattggactatatcagaattaaaacttttgcttttgcaccgtgaaagagtttttttttttttttttcttttcttttcttttttgagacagtgtctcactcagttccccaagctggagggcagtggcacgatctcggctcactgcaacttctgcctcccaggttcaagcaattctcctgcctgaggctctggaatagctgggactacaggtgcatgccactgtggctggctaagttttgtattttttttttctttttagttgagactggcttttgccgtgttggccaggtctcaaactcctgacctcaaaagatccaccctcctcggcctcccaaatgctggtattacaggtgtgagccaccacgcccggcctaagacccttttaagagaatgaaaagaataactacaggctggaagaaaatatttgcaaactacatatctgacaaaggactagtatttagaatatataaagaattttcaaactcaacagtaaaaaaatccaagcaactcaattagaaaatacatggccagacattttactgaagaggttatacagatggcaaataagcacatgaaaagatgttcaacattattaaccatcagggaaatgcaaatcaaaaccacaatgagttatcactatgaacatattgaaataactaaaataaaagataatgataacaacaaattctggtgaggatgcagagaaattgtgttactggtgagaatgtaaaatgttatagccactctagaaaatggtttggcagtttcttacaaaattaaacatgcacttatcatactcctgggcatttatcccaagtaaacaaaagcttatgttcacaccaaagcccatacatgaattttcatagagctttatctgtaatagccccaaactggacacaactcagatgtcctttattgggtgaatggttaagcaaactgtggtccatccataccatcgaatactactcagcaatgaattattaatacatgaaactacttgactgaatcttcagggaatagattaaaggggaaaaaaacacaaaaccaaaagattacacactgtacgactccacttgtataacatttttcaaatgaaaaaattatataaatggagtacagatttgtggttaaaagttaagaaggggtggagtgggagggaagtgggtgtggctattaaagagcaacaagaggatccctgggatggacacattctgtgttttgaatgtgtcattgtcaatatcttggttgtgttactgtgtaatagctttccaagatgttaccattgaagggaattggataaagggcatatggaccttctctgtattttttcttacaaccttcatgtgagtctacaattatttcaaataaaaaatgttagttaaaaaaggggaggggaatatgaacaaaaatcatagaggagaaggtcacagaatacaattgtagaagctgccttaaaaggccagggactgatttaaaaggggagagaaacggtaaaatctaaactgagattctagaacgtgtcaggaattcatggcactgtaaatgtatgaaagtgggaatgaaggaatattaaaagaacattgaaagaatgacaaataactgctaatcagtccccagagttcttgcccaacccgcatagcctgggaactgcctctcccaactgcctccctccctacttccccaggaggaagactggaggggttggaccaactacagggctcgtgattggagtcaccatgcatagctgaggatgggtataatgatgaaaatcggggcttaagtgaaagacaatatgatggggcttctgctctttcccatacttaaatctcagaacaatggcacccaggcttatacccctaaggcaggagattgaaagatatctttctggggaatttgaccagcccaaggaaagagacctataaatatcaacaaccagggcttttctaagccaatctttctagaactgtgttgtctaatatggtagccactagcaacatatatggctactgagcattcagactaatcaggttagtctgatttgagatgggccttaaatgtaaagtacactctgaattttgaatgcttagcgtaaaatctcttattaacttttattaacatgttgaaataatatttttgatatattgggttaagtaaaagctattattaaaatagtttttaaaatgaataagagactgaatttcttccagattgaaaacaggaaaaacgacttttatggtgcctctgtgcttttttttttttttatgaattgatttaaagcagcacattatcaacacaaagggagtgattagccaggaaggagaaaaaatagttgtgaccacgtatgtctgacatacctgatgtatctctttcttgctggtttctattgaaattggtttttttaaaggcacaatctgcggaatgacagtaggcaggttatctgggcatccctatgtatttcatcctcccaagtttatgttaaatttgttactttgggtgagagtgacacagacattgggcatggcaaggaggttctttatgtatcagtaggagtgcctccaatatgttttgggttgtccagtgagtcattctgtctggatcagaatccaagatctgcaacttagtaactgtgatttaggtcaagtaatttaactctctttgcctctgtttcctcattggtaaaacaggaatcaaaacaatagaactctttttttttctttttatctaattgtattcttatacaattagataaaaagtacaaaataatagtacttttaaggtcattgtgaagattgcatactttaatgtggggaaaaaaatgtttagatggtgcccagcacataatgagcattatataaatgctgcctattattattattattacttggggctaagggctctagtattatctctgatccttaggccagcttgtaaggtaagtagtgttgttatctaagattctgaggcttagagaagaagctgctcaactgggctacaaagtcacttcaaaaacctgagatttttttccattatacaatcatgtctcataaatcttagcgccctattgctgaaagaagccttttagatcatcctaggaggtttctgaactattctgcagagtgagtggttaagggttgggctctggggtccaaaaaaatcgtgtttgaatcctaacccatcactcagagcagctgggtggtcttggacaaactcttcaactgcttttctcttatgtggtgtctccctcataggttgttaggatgattaaattagataatatatgaaaagttattggcatactaagtgttccataattattaatttttatgattatggttttattgtaaatatgaactaagtctgaagctggtggcagaggtacaacccgaactctggcaggtctttttattcagtgctctctcttctccattttgctatctaattggttagtttttattcatccttttagagtctacatttctaaagtcagggctgttagtgaagattttagaagaacattttccaagagtttttttgaactgccaagtccagagatttaggatgtaccttggtgctgaagtaattggctctcttagtcttgcattataagaagttctctttcagagtataaggttgagaaccatgagaagaactctcacattttagtaattgctttatggaataacttacctcctaaaaacatatgtttttcagcttcaactcgttcctttcctttctgtgccattttgagaatctcctcattatatataatcacaatcttatgttctgagtttctccttttaactatttcctcaagtgccatcacttaataatattttcttttctgtttatcaactagttggggaagtggtatggttgttagtactgatgagtttcttaggaaaatacagaaataatttaatcttaaagattttctatctgtcagagaatctgtcataaaacatgcctgaagcaagctgcacagtatttactgcccttatatcacacctagacacagttcacgattggagattaattcagaaattctcattaatatgttaagctaaggacaaggatgagatgttttaatacttccataaatgcaacatttgttttgtgtgtgtgtgtgtgaattggattgctttgctgtgaacaaggcagatctctactttgctctaatatcgataatgtaggtgtcttccaaatttcttttaaattgatttctccgattcccgatagttagccagataggccatattatagctttttgctctcctaatgtagaagagaccaaaggactaatagtttttccaaaataactgagagaacattaggatatagaattacaaatatatttccattttgtcataaagtagcttaatatttttccctgttgcttagacattaattaaaattgtgacatttctcttatttttactagcaccagaataagaaaggtaaatattttgttacaagaatcttattccctgagagaaatctctaatggtaccttatatttcacttaccactctcttcttttggtttatgtggtgcttctgtttggttattgggctgctttacaatgaaaatcatgctaaacttttcagccacttttttgagttctttcctctgaacctggagactacagaaaagtaagtgtagggaaggaaaaataattttctctttaccctttatggtccttaggttgggatagacccagaaacaagagaaaaacaaacagaagttaaaaatatgtgtatctcatgtacacgtggaagatacccagagatatgaataaatctcaaagaggtggctttgagatcaggctcaaataccattgtccactgaaagaaaaaaaagaagggtatgggggatagtcagttgtggagggatgcccaggaaaagtatggtaaacatgagtaaggtttgttatgcagatttaagttggtgtcttctccattggtaagagtctctagtgatttggtcatccttctcttcctggtacagaaagggagacacccttatgagtagaaatttcctttatagatgtaaaatccttttacaaaaaggtaacttctcttctgttttcagatcttctcctgtagctgcagtctctcaaaataatcagctcaaaataatccttatgctaaagaaggatgttgtggggaggcatattctgatctaccgagtttcagttcttccctccttctaatggagcccaagttgaaccaggaaagctttatattcttcatccatctgacaatcagaagttattaaatgctttccatccagcaccatgttaggtaccacgaatactacagaaagcacattggacaattcccagatctcaagaaacttgagatctcttttccttgttttcttttacttttttctcctcttctaataactttccaaataatttgaggctgaggctgtttactaaattaaaggtagtctacaaataatagaacaattaatcatgaaagagaaacatggccatctttagtagtataagttggtaggcccatggaataaactaaatttggttgtagatatccagcaactaagaagaaagggaattatttggcatatgtaacattccttgtctgaccagagaaagcattccagtttttccatgcaggtgaaatctctctgtgatcaaacccagaggggtaatttattggttacaaagtaaatattgactttggtgtggttttcaaacatagtagtaggtgttgggaggtaaggatgcaggcatggatcatatctgtctttactatggtgtttctagagtttggcactgcgcttggctcatagtaggtgcttgtcacatagttgttagatttaattgagctattcagtagatcattttgcaatgacttttgataacaatgataaagtgctgtatactccatgcctttgaatattgttgtgtttctctcaagaaagccatcattccatcccttgttctccttctcatccttcaggtctcaggtttaatttaagttcctttgttttagtatctcttagagtgatctgctcctttgtttttgtttgtttatttgtttgttttgagacagcatttcacttttgttgcccaggctggagttcagtggcaccatctcggctcactgcaacctctgcctcccgggttgaactgaatctcctgcctcagtctcccaagtggctgggattacaggcacccgccaccatgcctggctaatttttgtatttttagtagagatgggtttttgccatgttggtcaggctggtctcaaactcctgacctcaggtgatcaactcacctcacctcccaacgtgctgggattacaggcatgagccaccatgcctagcctgctcctttcttttagacctgttccctgagtttcaaaggtttcacttcctatgggagcctttgactcatgcccatctcctctaatagcttccaggaggattagatcacctatgtaccctagcccctagcatatgtgcctggcacatataacaaagtataaatactttgttaaatgaacaaaagtaattaattactaaacaatgtagtgagttgtgcttttaatgagcgttgaaggaaaattgaataatggattaaaatgaaagtaaggttaaatataataataatgatgacatatataatgataatgttaaaatggttatgttaatgttaaaaaaggtgaatgataatgttaaaaatgtgatgataatgttaaaatgataatgttaaaaaaggtgaattctaatcatgtgccaggttctttacataaattatctcactgaatccccctaataacttaatgaggaagccaaagttattatccttattttaccaaataggaaaatgagcatggagaagactgatgattacttgggtacaatcatgcacctatttggttggtagagcccaggattcaaacccatgtccttaaccactatccaaaatatatccctgtgctattttactaaagcattctcaagtccacaatctggaggaacagaattatctgtcctcatgtgtcctgagtagtgtgacaagttaccctgtgacaacccaaaatagcaacagtcccccatcatttcacagtgaggcttcagccttgcttctgtccaggaacagaaaatgtagcagcagaggccatatgattctttcctttcactatcagtggagctggagagagatgttcttatcacccatcccattttagtgcacagctccctagctgaacgccctttgctgcagttccatttataaggagtatcacatacttcatttgttcatttgaaaacccgatgtttattgcagtgcagagcagccacattattataagtacttactcagacaaattaaatgattcagtgtagtagctctgaaaagtctaatttccatgtgtggaatcatgtttatcaacactcaaattcaaaggcgcaaaatagcatatttacattggtaacttattcataatattccttttctaccttgctcgttttattgttagaaaccaatccaaatcccatttttaggatgacacgtacaaaaggatgatatgcaactattgtaactgtgatggaggccaagcaatgagagcaaagccagcattctactggtgcctcctgccttctagtttcatgtattgggatttggggatggccagatttttctttgaaggtttggttgtttctttttaaacatacaatattgacccaggaggaagtattcaggtcactttgggctttcacttcatgattactgaactttcctgcaaacttttttgccttcacagactctctctccaggaagagaaggaacattcttcacaattctagcccctttcaagaatgacctccttggctcaaagaggatcttgcagttattagcagcaaaaatgaattatcctaaagcaaactcttttttttttaagcaaagttttctttttgtggggggaaaacctaatctcaagtcctagaacatggaaggttaatgaccaacttgctttaaagagagaaatatgacaagcaaaattgcgaaatctgctgaagaactaatcaagcatattgttcccttgattctagaaaattgcaatgtgcttttaaaaaggttgaaaagatgtccatggtgtacccttggtttactttgtctgtaaatgtgtgttcctgtgtcctgtagtgttggtggttccagggccagtggggatgcagtgaagaccatggctgcttccggtgttctggtgttcccctggcagagagctccttgtcattccaaatgacagatggttccctctgcgggctgaactgaaattcagccctccacgctgagacagtctgctaggaatcaccaatggtcacgctgattattaaaacatagttttgagtttcatccttaaaaaactaacctcgaccagcctgaccaacatggagaaaccccgtctctactaaaaatacaaaattagccaggcgtagtggtgcgtgcctataatcccagctacttgggaggctgaggcaggagaatcgcttgaacctgggaggcagagattgcagtgagccgagattgtgccattgcacttcagcctgggcaacaagtgtgaaagtccatctcaaaacaaaacaaaacaaaacaaaacaaaacaaaaaaactaacctcatctatccccatctatgattagcgattagcttaagtgcagtccagaactggtaactcccttccttccttctttccttccttccttccttccttccttccttccttccttccttccttccttccatccattcatccctccctccctttcctcctttctttactcgcagaaaacaaaaaagcacagatgagcacaaaaactagtgtaatgatcatctgtactctcactatcccaaaacgagtatctgtttttgtttggtcagatttgcttccagtgttgtttttttcctttttaaagaagttattgataaaaccaaatcattttcaccaataatgtcctgtccttccctccaccctccactttctttgctgcctgtacccctgcctaaaattccctaccataaatttgggatgtatttgactagtccgttgtttatacttttacatacatatatgtgtatccacagcagcagtccccaactttttggcaccagggactggttttgtggaagataatttttccatggatggggaggtggggggtatggttttgggatgaaactgttccacctcagatcatcaggcgttagggtctcatcataaggagcaggcagcctagatccctcgcatgcacagttcacactagggttcctgctcctatgagaacctaatgtccctgctgatctgacaggaggtggagctcaggcggtaatgctcgcttgcccaccactcacctcctgctgtgtggcctggtccctaacaggccacagactggtactggtctgccgcctggcggttggggaccccgacctacaatgaatacatactattgtgtttgtatgttaacattttcctttgtgttgcttttctgcccatgacatttatgaaacatccacactgatgcctataaaaccaatctattctttttaacagccatatgtcctttaatcatataaatatagcatattttatttactgatttgcctttaagggtgacttttaggtcatttccaagttttgttatactgatttaatatatgtccccttatgtgtatgtttcttagccctggtataccccccaagaagagttactatgccgtggcatatgtgtactgtcacttttgataatacagtaaaattgctcaatagaataatataccaattcatgattccgctggaagtaaactagaataatatgctattttttctcatatcttggacaacactgaattgtgtcagtctttttcatgttaactagtctgatagaaataaagtagaatcccattattttcatttgcattttcctcatgtttagtgagagtattagtcagttttcatgctgctgataaagacatactggagattgggcaatttacaacagaaagaagtttaatggacttacagttccgtgtagctggggtggcctcacaatcatggtggaaggcaaggaggagcaagtcacatcttacagggatggcagcagacaaatagagagcttgtgcagagagactcccatgttttaaaccatcagatctctcgagacttattcactctcatgagaacagcatgggagagacccacccccatgattcaattacctcccaccaggttcctcccatgacacatgggaattgtgggagttacaattcaaggtgagacttgggtggggacacagccaaaccatatcagtgaggttgagctgcttttcttatgtccatggtccattgttccttctttgaatcatgattttaaaaaatatttatttgtttacctttttctttttgttgattttaggagttccttatatattctggttacttattccctgtctgttaaacctgttgctaatatctttggctggtctggcatttgagaagataatttattcagatgatcagtacagttaagttgttacggtttctaatttaattctatgtactatcaagaagtcaggcgtatctctacctgcaatctattgcaaatccttttggatctgctttcaaaatatttcgcataggactgaccagttttcactctcctgtgtgctacctggctagcacctttattcaccaggataactgcaggagcctcctaagtggccttgttcttcagtttattcttaccgaatagccagagagagcttattaaaatgtaagtcagatcttggttcacctctgctcagaagtaggcaatggcttcccaccttgctccaagtaaaagcctaagttcttagagtggcccataaggtctagcaccctccagctccttgtcatcactctgacctggtttcctgccactctcccctggctattccagccatactggcctccctgctgttctaacatacaaacatgcacctgcctgggaggtttgtactttctgttccctctgcctagaatttcttcatccagagccatcatcatggttgtcccctgcacctcaaatcttccctgagacattaccttttcagtgagatctttcctgatctccttgctcaaaaatgcaacaatctccccaaacacactgtattgatttcctagggtggcagtaactaagtaccatatactgagtggcttaaaacaaccgaaatttattgtctcatagttctggaggctacaagtctgaaatcaaagtgtcaccagggccatgctccctctaaaatctgcaggggaatctttctttgccttttcctaacttctagtgatttgctggcaatccttggcttgcagctacataactccaatctctgcctttattctcacatggcgttccttctcccgtgtgtctctgtgtcttcacgtggtcatcctcttatatccaatcatattggatgagaggcctgcccaccgatctccagtatgacttcatcttaacttaaataattatatctgtatcaatcctattaccaaataaggtcacattctaagtactgagggttaggacttcaacatatcttttttcctgatggggaggggttgggggaacagaattcaacccatagtactcaccatctcccttcctactttgtgtttctccagagtccttagaactatttaaccactcatgtattttacatatgtattttgtttgtttgtctcctctaccagaaggtaggcagcatgatggcctgatcttggactattatgttcactgctatagagaatagtgcctgacaccttagtagagtctcaataaatacttgttaaatgaatgatcatctgctttcaattactacattgagctgaccatgtaacatgatgtagaccaagattattagattaaaaaaggaaacgattacctctaaatgagatcctagggaatgaattggtgtttatgatatttttatttcaaagaagtgtacatgaaggaaacccagaggtagaggtcagagcagtgaggaaccagccagttaggggattagtgcattgtcattgagtgatttatgagcagcaaggtctcaatagcctccctgtcacttgtccactttggggttatccctgcaagtaaggtgggtcatggggctttcactttgccctagcatctaacatgtgccagaaactgtacttgatactttattctcatttagaaaaaaaaaatcctcttcataaatgtacccttcaaatattattatacccgtttgatagagatagaaagtgagcctcagtgatgttgagcagctacataggacacagaagtagtaaacacattactaggattcaaactcaggccagtgggaccaaaaaaacccatgtttctttgcttgtcagattccttcagattctgtggacaccagagtttcaagggaaagtgagtaaactggccacacaggacacttcagacaggtgacttggcatagaccaccagaaaaccagagaaagactcttcccaccagactcacgggtcagcctcatctttttgcaaaatggaaagccccagtgccaggactttccagttcttgaggaggatcagatgatgtggctgaaacaaccctggactaggaatcagaaatgaataattaaggcatggttctgccccttttcttgtgtgatcatgtatgaaccacttacacccttttgagccacagtctccaatgtacagattaatgacaatgcctgcaaaaatcacatatgtaccttcattctgcccttttaacagtacctgtgtggcaatgctcagtattcatggtgaacgttcctaatgaaattgtacctagagccatctggatcactgctgaaataatcatctgaatttcttgtccttggtgtaggtatcctaggaatacctgcctgcttagaccctctataaaagctctgtgcatcctgccactgaggactccgaagaggtagcagtcttctgaaaggtaggtttacttaattttgatttttttttcaaagagtttgaaataattgacctgctgtgagtatccttataatagtagtaatgttcctatgtacttgtaaaatagaacttttaaaatggtaaaatttcagggctagattcccttggagaatttaccctctttcgacttctatttgtagctgccattttaaaaattggggtataaatattatgtcagttaaataaaagaatgatgacttcactttctgaagaaagcattccccttcttttccatgaaatgtagcttacctgttacctgactgacatgccattatattatcctccccccagcagttacacatatttaataatttttacgtgtaaaaagtaaggttaaacagttacaaagtcaggttgttatgttttgcatgactttgagaatgctagtggaatggaaataaagttaggagcagcaggaggaggctctgttgaaacagatctccttcagtggcatggtactgttcatggtcagaggaagtcctagggcatatgctgggacagacagtgaagggtaggtcttacaaagaggctttacgttagagtaaaataatcacttatctgtatgcatctttgaatgatttcaccggatatgttgaatatgtatttttaaaaatagcagcaaagggcctgtaatcccagtactttgggaggccgaggtaggtggatcacttgaggtcaggagtttgagaccagcctggccaacatggtgaaacctcatctctaccaaaaatacaaaaattagccggatgtggtagcaggtgtctgtaatcccagctactcaggaggctgaggcaggagaatcacttgaacctgggaggtggaggttgcagtgagctaagatcatgccattgcactccagcctaggcgacagagtgagaccctgccaaaaaaaccccataataataataataatagcaagaaagtaggagcaatgcactaatctggtaatctctagcatgtcgtcaggggactgtgctcatgtaacccctccttaggactcatatttactcctctccttttctgttacctcatctcatctttactcctttaacagtatctctcatttccgggtctcagacaatttaacatgtataataaatatgtatattgaataatcctatgtaccagaacacaaagatactatattccttttcctgcttccggttaagtcccagtttcctgtatccactttacaatgtcagccagcttatccttcgtgctgccttccctttccctctcattccaaagtcacttgaaacccacggtttatgcaaaatttgcaaagttgggcaggattgcccctagagttgtagaactgtgagacattgctgcatcttgttgtgggatgaggcaggcatctttacttcctaatgtgccagatttttctctggcaggtcacctgcctgtttagatggtttacctggaaaacaaagtttaaaggcagtaaatgaaatgaggtaaaatggagcactggtgttatgtgccttttcatatgagcctttacatataattatttgatccttttgttattgtttgggttagtgttttaagccctgaaggagggctttcttttttgaaatggagtctcgctgtcgcccaggctggagtacaatggtgtgatctcagctaaccgcaacctctacctcctgggtttaagcaatttttgtgcctcagcctcccaagtagctgggattacaagcgcccgccaccaggcccacctaatttttgtatttttagtagagatggggttttaccgtgttggccaggctggtcttgaacccctgacctcaagtgatccacccacctcagccacccaaagtgcagggattacaggtgtgagccatcactcccggctagaaggttctttttaaacataaaagctgtcaatataaaatatattgtttctggaagggtggcattttaatatcaataattactgacaaaaaggactgtagactatttaagttttagaaaccctacttactcctagaaagacttctatcttctctcctaatagtaaagagtatgtgcctgatgtctccaaaacccctttgctatttcttctctttacaaagactgactcagagttctactgtttgctgtgtgctcttagtgaactcaacctctcggaactctggttacttcctccgtaaaatgaagctagttatgggaactgctcaaagaatagttgtgaaggattaactgacaattaatgtaaagtggttagcaaggtggctggtatacagaagctttcaagaagtggaagccataatgattatgattagaaggaattgtgcaattaccaactctgggttggcattttaggattttcagtattctgtttctcgtggcatattatctattgcagttttcaatgaggcaggatttagagatatctgagaccaaagaaataaggtaaaataacgtggcaaagtaccatgtagataatcactggtagtcatgattctgtataagcctcattgctttgagattaaatgccaccagtctaagagctagaattgattgatgttctatcattctatcatttaactttatgctgtgttttcattccaagtcttctcatgtacttggcaagatgatcaaggaagccctgagcctggcttctatttctacttaaaaccaaactcaaatgtcactaaatgagggaatggacggaggttaagtattttgaggagaggtgttaggaaatgcaaaggaatgtttcctaaatgtttttacttgtttccatttccaatatggctaagtaagttctactggatccgaaattctcacagatatcaactataaagtaccaaaagaccaaaaacaaaaaaaaaaaaaagaaaagaaaaaagaaaagaaaaaagaaattacctggaagcattagagaataaaattaagcagacagattctggaggggagctgaaattcaaaacttggaagcacaggtcggtccagagtgagtttcccattttacaacttttagagtgagaacaggctaaaattaatgtcacttcgggtggccatcctccaatagaaaactcacagtgtttttggtttgaagacccaaagaacagggttcagggcaatcatagccacaggaaaatgaattcagaatcttggaaagaagagaggcagagaggggaagctcccaaatctgtatataaacactacccaaatttctggttgacccttgaatttattaatatgagacaaactaaactttcagacaaaaagagttaccagagatgaaggagaacatttcatgatagtaaatcattatattaagaagaagtaagaattgtagatgaatatgcacttgataaaattccaagtgagatcacgtcatgtaattctgaggtatatgtcatgtgtatattcttgatggagcagacacaaattatcacaaagataaaagaactgaactgagattcgagctgctacccaggggatagttttaaatttgagtataactaattgcctgctaaaacaaataaatcaatacccttcagaaaactataacaggattgaagctcttcatacaataacatcaatacttgcatatcatacaaccccaaattacacgctatatggaaacccaataaaatgtgactcattctgaagacaaaaagcaattatctgagaccaattccaagatgagccaaatgtgggaattaacaaagattttaaagtggctattttaaccatgctccacaaataataggaaaataaactcataatgaataagaaggtagtaaacagaaactgcaaaaagaaccaaatagaaatcctgaaactgaaaaatacagtatttgaaataaaaactcattgagtatacttacagcaactggaggaaacaaaggaaagtgttagtgaacttaaagatagatccatagaaattttcttttggaagaacagacagaaaaaaagacttaaaatgactgaataaaaaaaataaacagagactcagggacctgtgtaacagaaattaaaatgtctagcttacatgtaattggagtctcagaaggagaagagaaagagaatgaaacagaacaaaatatttgaagaaataatgggcccaaattttcaaatttggtgaaatacataaatgcatagatcaagaaatgcagtgaaccccaaatgggatacatttgaagaaaactgtgcataggtacatcatattccaactggtgaggaccagcaataaagagagaatcttgatagtagccagagaaaaatggcacggtatctttggtggaacaatgctttaaatgaacgatgacttctcatcagaatttataaaggccagaaaaagtgaaatgatgtttttaaagtacaaacgaggggtaaaaaaaaaagcaaaacactgttaatccggaattctatgtgtagcaaaaatatcctttgtgagtaaaggcaaattagtacattttcagataaaaggaaactaagagcatttattatcagcagacctgccccacagaaatgctaaaggaaagattgttcaggctataaagtgagataacaccagatggaatcttaagtcttcaagaaggaatgaaaaaattttggaaattgtaaatataaaagactagtttttcatgataagatctttaactacacaggacctgttaaagcaaaaattataacattgtcttgtggtgtttataatgtaatatgtacagatgtaatccatatgactttatagcataaagaatggaggcagtggcaaatggatttatacagttgcaaggttttccaattttatatgagatagtataaaattaaatctaagtagactgtgaaagatcaagaatatacgttttaattcctagaaaaaccaccgaaaatccaaagataaaatagaatcctaaattaagaaaaaaatgatccaaaagttgcagagggaagaaaaagaaaaacaagaagtggaggagcaaacagaaaacatataataaacttgcagctctaaatgcaatcatatcagtaatcagactaaatgtcagtggactaatcactaattaaaatgtagcagtgtcatagcaaaattctacctgatgtacaaagaagagctggtacaattctactgaactattccaaaaaattgaagaggagcaactcctcccaaactcattctgtgcatcaccctgataccaaacctgacaaacacacaataaaaaaaaagaaatcaacaggccaatatccctgatgaacatagaggcaaaaatcctgaacataataccagcaaaccaaattcaacagcacatcaaaaggttaatttactatgatcaagtaggcttcattctggcatgcaaatttggtccaacatgagcaaatacaaatgtgattcaccacataaataggatttttaaaaagccttagaatcatctcactagatgtagaaaaagcttttgctataatccaacatcccttcatgataaaaaacttcaagaaagtaggcactgaagaacatacctctaaataataagagccatctatgataaaaccacagccaatatcatactgaatgggcaaaaactgaaagcattacccttgcgaactggaacaagacaaagatgcccactcttactactcctattcaacatagtactggaagtgctagccacagcaatcaggcaagagaaagaaataaaatgcatcttaataggaaaagaagaaatcaaactatctctctttgcagacaatatgattctattcctaaaaaactcaaagacgccaccaaaagcctcctagaactcagaaacaacttcagtaaagtttcaggtcattaaatcaatgtacagaaatcagtagcatttctgtacaccaataatgttcaacttgcgagccaaatcaagaaggaaatctcatttacaatagcctgaaaaaatagaagtatataaaatacttaggaatacatctaaccaaggagatgaaatgtatctacaaggggaaccacaaaacactgctaaaagaaatcatagaagacacaaacagatggaaaaacattccatgctcatggattggaagaatcaatttcattaatgtggccatactgcccaaaataatctacaggttttatacaggtagtttataaaactactctaccatatttcacagaactggaaaaaactattataaagtacatgtggaatcaaaaaagagactgaatagccaaagcaaacttaaacaaaaagaacaaagctggaggcacacattttccaactccaagctatactacaaggctacagtaaccaaaccagtatagtactggtacaagacagacacagaaaccaatggaacagactagagaacccagaaataaagctgcacacttacaaccatctgatcttcaacaaagttaacaaaagcaatggagaaaggtttccttatttaataaatggcgctgggataactggctagccatatacagaagaatgaaactggacccctacatttcaccatatacaaagctaactccatatggagtaaagatttaaatgtaagaactcaaagtatgagaatcctagaggaaaacctaggaaacaccattctggacatcagccttgggaaagaatttatgactaagtcctcaaaagcaattgcaacaaaaccaaaaattgacaagtgagactaatcaaaccagagagcttctgcacagcaaaagaaactgtcaacagagtaaacaacctacaggatgacagaaaatattcacaaattacacaaccactaaaggtctaatatctggagtctataaggaacttaaatgattgaacaagcaaaaaccaaccccattaaaaagtgggcaaaagacatgaacagaaacttctcaaagggagacagacatacaagtggccaacaaacatgaaaaaatgctcattgtccctaatcatcagagaaatacaaatcaaaaccaccatgagataccatctcacaccagtcagaatggctaaagtaaaaaaaaaaaaaacaacaaaaacaaaacaaaactaaacaaacaaaaaaaaaccacatgttggtgaggctgctgagaaacaggaatgcttatacactgttggtgggaatgtaaattagttcggccactgtggaaagcagtttggtgatttcccaaagaacttaaaacagaactaccattcgatccagcaattccattactgtgtatagatccaaaagaaaacaaatcattctaccaaagacacatgtacttgcatgttcattgtcacagcactattcacaatagcaaagatatggactcaacctaggtgcccatcaatggtggatcagataaagaaaatttggtacatgtatatcatgggatattatgcagtaataaaaaagaatcgaatcatgtcctttgcagccacgtggatgcagccagacaccattatcctagcaatttaatgcaggaacagaaaactaaatgccacatgttctcacttgtaagtaggaactaaactttgggtacgtgtggacgtgaagatggtaacaatagacactggggactactagagcagggaagaagggagaggggaaaaggttgaaaaaccaaatggtgagtactatgctcagtacctgggtaatgctaccattcatatcccaaacctcagcatgatgcaatatacccaggtaacaaacatgcaaatataccccctgaatctaaaatgaaacttgaaaaaataaacacataaaaacagatgaatgaattttttttaaaaagacctaagcccaagggctttatgaatgcaagctactttcaaatgattgacaaaatgaataagttttgtgggcaaagaaaccaaacaaacaaaaataaataaatattcaaaaaaatgctgagatgattagaatgtataaaaaagcaagaacagctatgttctgttaagagatagcctttaaataaaaaaacacagataggtttaaaataaattgatggaaataaatacaccatggaaacagcataggaagtctagagtggctataataatatcagacaaactcaactttaagacaaaaaatattatcagagataaagaagaagagtgtgtcataataaaggagtcattaaattaagaagacataaggattatacatgaatatagacttgataaaattccaagtgagatcactttatgtcttttcaaatctagaattttttgacgactgtctcaatcatgagtcaaaagacgcaagtggctcatcactttaagctaacaatcatttaataaaatcatggaataaaaacaacacaggtgaaaaaatgtaattggagagtatagagatctcagtataactgctgctaagttttttattgtaatgttttacaacacgtgtttgcttcatttaatgcgttgtatatgtttaagcacctcccatgatctaggatcaagttggatgccttcaaaattcttcaaatggagttcatatttaattagtatgcaccagaacaggcattaagcctatgctggttggtgcctttaccatactaatggttaaatattttaaatatcatttgtcttagtccattttgtttctgctataacagaatacccgagattgggcaatttattaaaagaaaataaatttatttggttcatggttctggaagttgggaagtacaacagcaaggtgctggcatctggtgagggcctttgtgcttgtcatcccatggaggcaagcagaagggcaggagaaaatgaaaatgagccaatgagagggccaaactcatttttataataactcactcatgataacaaacctactttcttcataatgatgttaatccatttatgaaggtagagctctcaagacctaatcatctctcagtggtcccacctcttgatggtccctcttctccataccatgacaatggcagttaaattttaacataatttttggaggggacatttaaatcataacataacccctgcttacaatagttatataagttcaaagtgtttcctccatttgccagtggaagaatctatggctctaagaggttcatactatgttgtccaatgtcatacaactaatggatagcagagccagccttcaaatctgaatctgtctgtttccaaagctgcttccactgcacagcatcgtttttctctggggaaacaccactgactcatttttgttagggtatgcatatgaggaactacagtgctatttttgtggactcccttgaagataaatgaacatctttatggtatgtctggctacattctggatatagtcaatttatgggttagaattcgtgtactgtgaagtcaccagtggagtcatggctgtgagacatagggaaacttggtatttcacatagaggtagaccatgattttggcccagttttgtgagtaccctgaagtataaattattaaacctgaaaatgtcacatgtgtgtattcttgataaagttctgtacttctggttgggcacagtggctcatgcctgtaatcccactttgggaggccaaagtgggtggatttcttgaggccaggagttcgagaccagcttgggcaacacgatgaaactccatctctactaaaaatacaaaaattagccaggcatgatgctgcttgggaatctgagctgcttgggaggctgaggcaaaagaatcactggactccaggaagcagaggttgcagtgagccaagatgactccactgagcaacaacagccagactctgtctcaaaaaaaaaaaaaaaagagtctgtatttccaatagacatgtttatattaagaatttggaatttatggacaacttttccagatctccatgtactctgtgacatgagagaaagacagcaagtatggatcttcacctagcctggggcagaattttacatcagtgcgtgaagtttggagggataaatgatttctaaatcatgtttaagggtctatgcatttgtgttttacttgtaattagtagaactacaattatttcttagagtcaacatttcagacttttaaaatgttactatgtatcgaatgccacactggctgattttgaaaatattctctctaaatctttacaatgatcttagaaatatatattatccctattttagaaataaggaccctgaagcttccatattttttcctcgtaactagaaggctaatatgtttgatcatcttcatggcataggacccaagcaataagctatggcttcactgtacttgcttctggggttttctatgtcatttccatgttatatgtgaggtgtcctagcctggagtcaggtgacatggattcttgttatggatcttactagttagctaagaaatctcaacttccttcagggtagcttataaactattttaagtaaggttactaacatatgtatagaaaatcaggaaacaaatctgctaaccgctactgctaacagagttgcaaacatacatttagcatgagaattcactcgagttttctgacaagcagagcaaagagggaaacagtagtttcatattcttgtaatcagaaaagttaaaatgtcagaaattcctcatatgacctctaagaacccttcttatttcgagattttataaaaacaggtgtaataacacccaaaattcagaatcttagtaggattaaataaaatcccatttgtgagtgaatgttagcttactgtttttcttcttatagaactccaataaaggctcatggtagaaatctcaggacagtcagactatagttagctttgttaaaaccccatactctgaatttctgtgggtaaactagtctctatttaagtatgcctgtgttgtcagtaactgtgcgaaagacttttacgatcttgttcatacaaagcagatgttattgtccatgtttcataaattaggaaactgagcccctgagaaatgatgtaatttgaccaaggccacagagaagtattttagtcagaattcgaacccctatctctctgtcaccaaggcctatgttttttccagtacgctgaatcatttctaaactattgaataatttaacagtttgggcattatttctaaaaacaattccagtttataaagtgatctgcatgaagaaccagcacatactgggttagaattcatgtactgtgaaatcaccagtggattcatggctcagaaagctccaccttgcccctgacaacatccagagaactttaaatatctatattttgtttttgtgctttgttttttaagaagcaatttcttcatcaagacttgaggacttggagagtgacagagagttaaggttgcctggggaccattagtgacagctttgccaatacagttggaatgttcctcaactgtaaagcttatttaatgaaaagagacccaagaaacctttctactaatgtgtagtgctctcttgtcagtttgaaatgagcaaactgtcagcttgccgattaccatgcacacagtatatgctcattaaatcatgcactgtgggtttcttcaggttgtcaaactgcttaattgaaaaaatgtgtagtgtcgctcctatgggaaagaggcaagaatcaaagggctggagagcttactcttaatatttcagtttgcttttaactgcagccagaaattgttctgttttacagttttgactaaaggactattccttctgtatttttcttgttttgtttataattcaaacactgtaattataatggagttgcttttataatagagctactaaatcattctgccagctgatgaaaactaaagggaagggctcattttcttgtgccataactgttaaggccaacttgggtgtgttgaggctgacacaaactgggaatcaagagctccagatggattttagtcttgcgaaatctctgcttcagtgtttgcattttgtaggagtgttaggccttatcatcaccgcagtgtgtgggttaatcctttctgacagaaatgcccttaggctggtagggtttctcaatttgtttatatggtagctttaaaaaataccaatgcccatacagaagaaatcagaatccttgggggtaaagtgctttaaaagccccaggggattctagtatgagccagggttgagagagactagcctaaatggacttgagttgttcagtagctcaagtcaagactaatcttaccagctgttatcatcaaccctgctcacatcaactaatgttttctaaaggcttatacaacctttaaggtttcagaaggttaaaaactctgatttctgggctccacttagatctattaaataagattctttggggtcagggcccaggaatctgtttttaataagagctctgggtgattcttatgtactaaggtttgagaatttgctaaagaagcaagatgatatttataagtggggttcagtgaaacttcagaggagagtttgcaaatcacagtaaattgagggcaaggttttttatgctttttaaatggtagtgattttggtacattcatctgggtctaactggagtcatgcatggttataatagcatccactttatttagggggaaaagacccccactatctagtgccatgtaagacctgggaatacacacatattctattgcctctttaatctttaggtaccaggaactaatgactagggccaatgtatttttcaagggcctatgaaaatattcagaactaacagagagagaaaaactactttgatttcagtgtatgcagaaattgcacaatctgaacaatgtcatatttaatgatatgtcaataaatgaaattttatgctattgtgattaattactaaatgtaatagttattaaaatgtctactcttagagacattttatgagttagcttttctcagttcttaagaattcctgaaactgcatgttgattactgggaaattttaggcaatttaaaaaattaaattaaccaaattatacataagcaaataattttaaatgcaaaagtataaaaatatttttcacagatctcacatacaaaaactgtttcgtgtatgttgaataaaatttatagaagtccattggtttggactgaactactgaaccaagctcaacagtccaaaccaaaatagaattactcatgctgaagttttggccaccaagccaaaaccaagtttttcatctgaccttctaagaaatcaggggggagaactagtagccaaatcctcaactagaccagttgtagccaatatgataaggatgtccctctgctttaacctttacaaggaaagtaacttggaaacaaccaatttgcttttggttctttgtttctgctttcttcatcccttttccagctgtaaaggaaacctcctctgctcagctcattggaacactcattcttttttatacagtgaggttttgtctgattctagaatcacaaataaaagccagttaagatctttaaactaaatttgtttcaattttgccttttgacctgtaaatatatctgatataatatggggttgagcctctcaaagaaaatgaacctaaagcctaggacggccatgtaggtatttccagactacacatctcaaaattaaaggatatttaattgtcctagggttcattctcatagacaagattatcaaaatatatgcataatgaaccttcaaaagatacagttgaaataaaaaaattagtgctcacttttcctccttttaaaagaaacaaaagtgtaaaagaaaaaaatcaatatttttagccacatatcacactacctttgaaagcacataccttacataaaagttgggactattaatgagcatcagatgagaatgacaaggcaaattgcatgctacaactctggctcagaaaattacccctcagcaattgcagtcatagtagtggatgccactggaaatctagtgtctctgaggtcaatagatgaccagaactgaatatatagttttaaaaatgttcatggcctattcacactttggattggactgcctatgaggtccccagtttcaggattctcctgatccatggaggatgattcctgctagtgaggtctttatcgacatcttatttaaggtacacctcccctttctttatcttagcctcttttttcctttttttattttattttttttttagtaaaatttgctgtagttgtttcatttgtctatttacctttctttttcactgtctcctctagaatgtaagctccacgaaagcagaaaccatggctgtacttctttaccaagttaatcctggggacaaacagggtggtgacaatcgatcactttgcttttgccagcaatgatcagtcaggagtggcatgctattaggaacaatattataaatgctgaactggtcaggaaatattttattttactttatttttgagacagagtatctctttgctgcccaggctggggtgcagtggcacaatcatggctcactgtagcctctacctcccgggctctggcgtcctcccacctcagcttcataagtagttaaggccacaggcacatgccaccatacccagctaatttaatttctttttttttttctttttttttgtagagacagggtgtccctatgttgcccaggctagtctcaaactcctgggttcaagcaatcctcctgcttcagcctagaaaatattttagtacattccttttaaacaggattctagttattaataagtgagtgatggaaaggaaactatttgtagttcatgtagacctctcttacctccaccagcatccaaaaggggggaagaaaatccacagaaatcagcttgtctataaattctacaacttctagatgaataaaatagttaattgttcacttgaaaatgactactttacacttttggagagaggcctgaaaatttcttggcaatacttcaactgattaataatttagaacaatgattgactggagaatggaagtggcgctaatagcctctcattttcctctttattatttcagacaaattggtaagtcatggtggaggtgtgggatgtttctgggtcaactggctagaagctttaaattaaaaatgaaggatgatatttgatcttaattttctaagatgttggcctcaccccttgatggtacgagatacctttgcgattgcattgcttctgatgcttaatccttctatgcactcctggcaaagtctatgtgaattacagcaaacttttactgtgactctgctacgtgtgccatatcatgttaagcactggttgggataaaacaatgggtttgatgcaattctaaccttaagtagttaaaaggtctggcaagaaagacacatatgactataaatcatcctcctaccaggtaaaaagtgttaagtatcttaagagaaagatatgaacaaataccatgggagccattagcttatggtattgatgtgaggaatctgcctaataggaaattagtgatttaaaacaatgtgaaaaagtcaaatcagtacaaatagtgtatgctgataacagcaatttgaattatgaagtgactaaagaaggggtgctggcatgagaagctggttcagagtttcagggctacataaagctgcaggtccgccttcaaaagaaaagattcagataaattgatcctagaaggaccaaagtgagcctcctcctagaaagtgcacaggagtttagctgggaatttgcatttgttcttgggagaggcaatggctttaacaggagacagggttgtggctgctgcctggggtgctgatgttttcctgcctctaagagagaagcaactgagccccccaactgaatcccacaaattccaaagaaagcttaatttttcatctagataaaatagttgtgtatttgagtgccacatttgtttccattttctgaacttttgctaacataatgaagatctggatgccaggacttaaggagcaaaggcttgtggacttcctatggttaagttcctcctatgcacttaagtaatatacagaatattcatgcttctatatgtatatgtcattgtgatggcctgaattgtattcccctgaattgatacactgaagcctgaatccctaatgtgactgtatttggagacaacttttaaaggtaaccttaattacccctttaaaggtaggcagggcacggtggctcacacctgtaatcccagcactttgggaggccgaggtgggcagatcacgaggtgaggagattgagaccatcctggctaacacggtgaaaccccatctctaccaaaaatacaaaaacaaaattagccaggtgtggtggtgggtgcctgtagtcccagctcctcgggaggctaaggcaggagaatggcacgaacccaggaggcggagcttgcagtgagccgagattgcgccactgcactccagcctgggtgacagagcgagactccatctcaaaaataaataaataaataaaataaaaataaaaataaaggtaattaatgttaaatgaggtcataagggtgggacctaatccaatgcaactggtgcccttataagaagaagaagaggagatactaggggaggaagcacacagaggaaagaccatgtgacatggtgaacgaaaaggcagccatacgcaagccagggagagaggcctcaggagaaacagaatctgctgacaccatgatcttggactttcagcctctagaactgtgagaaataaatttctgttgtttaagccacacaatccttggtgttttgttatggcagcccaagctgactaaggtggtaattgacatatttctttgatagattttatttatgagcctcagttgatgacaagttaaatacaactcttaatttgggccaaagcaactatgaaagtccttaagaaacgattcccccatcctgcctattgagtaatgcccagcataaccatagtataaagctactcatttatgcagagcaattctttcatctgaccatctacttctttaccaaatattcattgagtatctactatgtgctagttactcgtggattatgctcaaaaggatctgtcagtctagaaaaggaaatataacaggcaagtaaaacacagtcatttgtttgcagaaattgccatggccatgccaagagtgcagggattcatggcagctgggatggcagagaagtctcctcggaggaggtggcattgaagaatggttttggaggatgatgagatttagtcatacagggctgtgcaatggaggaaggacagttgagaggagaaagaatggtaaacaaaggcttagaggttgaatctctagaagtttacagggaagcaagaactttgactaaaatgcagcttatgcaaagggaaattttttcttcataaggccgagctatctcagactcaaagagctttcataacagagtgatgatatgtcaggcattgtcctatgtacattattacattgactcgttcctactcgtagtaatgtaggtgctaatattctctccactttatagatgaagaaactgaggcatagatgggttaaaatacttgccaattactaatgaatggtggagctgggatttgaacctaggcatcctggctccagagcccttgcttgtacaaaggaagcctgagagcatctgaactaaagtataaggggaagtactgggggtcgatagatttgcaaatggtgcaagatgcggagtttcaagatagtaggcaattttgtgtgtttccttgagcaaagagaaaagcagagcccctgcctcctataaccatgagggggatcgcagtgcccttgatcacttttcagcaagttagccgtgtttgtagccctccgtggagctaaattgttggtgcaatgaaacaaaagtgtttttcaggctctctgctgccatggttagcctaggacagggttatgaaaggagcttttctgcctccgctgccttccggggttacattcttagtgaatctactgcctcaaaatggagcttgttagttgcgtgtcatccgagggtggcaattagttgcatgtgtttggttggatgccagcccctggggtgccagacctcagtacgggagccactgtttgtcatgaatcagtctttaaataaaagcaagtttttaaaatggaccatgctaatttggattttgctaacctcttctgaagaaggcttggcctgttcggtgccagctggctgagttggcattcagcgagaaactgggtccttaccaaaaatcgcattgctcccctctccctctttgaggggaaaatggcagggaggagctagctggcactgcaaaacaaggtgacaccaggggcagggacagcgtaggaatctggatgattaaagggaactgaagtgccatgatatccccgctgctccccaccttagaaaagaaaagctgcccctctttctccccactcacaccaccctcagccacccattcagtaactttccacataaaaggctttctcatccaattgcttatacactgcaccttttatactcttccaagttgtccttaagggattatcactgcagcttttaatttcccctagaaagagctgaatgaacgtgaatggggcggaagagtctttactgagaaagtgtcccccatcccaaaatgctcacaaaacctctaatcacgatggaagaatgccatcctgtttttggcggcggctggctaccaatgcactaatgcacagtgactgtccgtataggcggtaatcacgaggaagcatgttgcacacacaactcatgctcacagatcatgcggtgcacacaccaggccctggtcactttaacatggtgctttttcccattaacaaagagcaaccccaccgatttcagttgtgattcttgaaactcagccctttgcccagtaagtgctaaccggaagacttgttttcttacactttctaggtggataatctgatcaccacaaatggcaagggtgatgccatcaacagttgaaaacagaaactctcctatttatttatttatttatttatttcggtttggtttggcaaacatcccattgtctccaaataggattgcttggtattgggagagcagccttgtacataggcaagacagaagaggaattttaatcagctttacatttgttttgaagattcaggaaagatggaggctttatctcataccaacgtatctatgccatagattgctgggaaacaagagttgtcctggttactaacgtagtgtacattaagtttcctggaatttttttttttaagcctgtttatttgatgctggcacctctgttcttctgaaggcagcatattaggtttactaataaatgacacccagttcctaagagactcggcctaaaagctttcctgacagggcaggaatttgtttcttttttctttgcttttattaaaaaacaaaaaacaaaaaaacaaatattgaggcaaaatcgaggatgaaggacattttgaaaacttgagtactgtaaatagttttaaggaagatttcatttttccaaaactacacattttgcagtttctttaaatgcccatttaatattttgggtcttgccagggcaacgtgttgcttttacgaataagagccaataatgagcccatggagcctttaatttatgatgtatctgacagtatagtggtggatctgataggggatgcatgtgattatgtctgcaagctgaaaataaagtagctggtatttgttctgaaaacgttctgagaacaccctcctgttaatggcccatggcttgatccagcatctggtaaactaatagattgtcatttttaccatgaaagcataaatcattaatgattccacaaccatttgagttcttctctggtctagaatatgccaattaccatgaaattagtcctattagcaacatgattgaatgatagtaacctgactgtaacttgttggcagaaattctctcataatgacagtaatgaactgtgcatttgagtccttgctgggctctgttaaacaggaaggttggatattatatgtttctaaccccttatgaatgatacttcttaatgattatgtgaattgaaggaaatgttctgttttgccgatttctttcaatgtaggaatttatcatttttacttaatttgttgggggaaggaatcactgtttgccattaaaaatgttgttcagggactactttgtgctacacacatattacgatcatcaccagtatgtatatagagcctaccgtatcaggctttcatgagagacaacactggaatttttaaatgaaacattccacacataatcatcaccaaagaatgagataataccatcagtgtcagggaccctgagaaaaatacagagagcccaatactgtcataagattaataagttaattttcatttctcttttgcataaccttggtctgtaaggtcacatgacgtgcctaactgaaaatgtgtatcaggcagatagcccaagacacctaagatgagccaatgagaaggccaggagccaatgtgaaggccaactagcccccactggtagggcttctgtcatgcatagcagtaggacaggttatttaattctccaaagatctagggcaagtagttagtggattggacacttcctgtgacacatctcacatcctcttgtctccctttctgtattagggctgtcgctgtggaaaccaggttagggcaagtgtgacctgaagcctcttgcctaagtggcattgggcatccctattttcatccctattttctaccaccttgggagtgagactggcaacctggaagtataagagagttattaacccacggaataacccctgactggtggggactgggagttggtggataaataatctcttccatgccttgtttagacatgtctgaagcacattatacatatacatctgaagcatgtaagttttctcggaagattccagcaggttgagccctaggtgcctgtagttgttatcgacttgagaatgtatacttatattgtatttccctctgtagaggatgctgttggtcccctaccaagaccaccattagtgggtcaacacacccatgccccagctgcttagagtgttggatactaaggtctcacagctgaactcatctcaggagaattaaccctctattgagggaaatgaacttccccagaaataccttagaggatcccctatgcctggtcaagggcagtccacagccaaggactaacagaagctgtcaaggggaataactctgtggtgctgttcatactccatactcttgtccatactctgggtttgggccatggctggactccagctgaagccatatctttccgtggcttcttccctggcccatcctactccctcatttccccataggtttctcctgagggcactatttcaatcaatttcttgtacaagcgtacccatttcagagtgtacttctagggaatctgatttaagatacccttttcccctgttttactctccctcgttcctcaatttgattatctagggttcttttcccaaaataaactacctagttgtaagcctttgtttagggtctgctttcctgagtgggatgtaagagtcagatggggaacacaggctaaggctgccaatgatatcaatatgttttggggttccactccatgctgctggctggattaagtgcacatggtctctactacatacactatggaaggaacttagatttagaaagaattaggcaccgtaagatgatactaaagtgaatgattcagataataaatgtagaaatcaagacctattatttggggctgaaaagggtaccaaagacttgttgagagaagtgtgtttgaattagtgaaagaaataaatatttgagaaggcagagagaagtgggggaaggaaattcagcttggaaatacagcatgaataaaggatctgagtgggcttgaaaatcattagttggggggaccctgatattgctatcactctgggaataaaggcttcatgctagaatggttcgataggtccagaatgtgcctatccatttcatatttatttgttcaacaaatgaattgatattcatttacttttttaacaactatcttttgagtatgtatgatttccaggcattgtgggcactggaagtgataaacaaaataaaaattatcctggctctcaaagagtttacagaataggaaatatacaagtaaacagataaatatatagaattacaggttttcttcctatggctgtgaaggaaattgaacaggatgcagtgacagaatatagcaagaatcatatatattagactgaatggacttacaagtcttcttggaggtgaaaatgtttaagcagagatgtaaaaatgaaaaaagtagccccgaaaaaggagtagggaaaggagaaacactgtagccagatgattgcatgtgcaaaggtcccgaggcaagaaatgcctcaatatgttagaagtacaataaaaggccagataatactgggcaaggaaggaagtgcacaagataaagttggaagatagggaagaacaagattttagagggcatcatatgttataaaaaaagactttgggccaggcgcagtggctcatgcctgtaatcccagcactttgggaggctgaggcaggtggatcacctgagggcgagagttggagaccagcctgaccaacatggagaaaccctgtctctactaaaaatacaaaattagctgggcatggtggcacatgcccgtgatcccagctacgtgggaggctgaggcaggagaatcgcttgaacctgggaggtggaggttgcagtgagccgagattgcgccattgcactctagcctgggcaacaagagcgaaactctgtctcaaaaataataatactaatcataaaagactttggatttaatctggaatgtaatggaaaacaattgaagagcttttaggaaagaggtgatagtttatgtttttaacatattaatttgttatgtggaaaataggttggtgagggcaagaatagatatagagagagcaataaaaaacctattgcaggctgggtacagtgggtacagtacacctgtaatcccaacattttgggaggctgggtgaaatcccatctatactaaaaatacaaaaactagcagggcgtggtggtgcacacctgtgatcccagctacttgagaggctgatgcacaagaatcacttgaacctgggaggaggaggttgcagtgagccaagaacatgccactgcactccagcctgggcaacagagcaagactcagtctcaaaaaaaaaaaaaaaaaaaaaaagctattgcagtagtgcatgtgagaatagatgattgactggtctaaattagagtcaatggatgtgcactagaatttactagactgtaattcaagacagtagggcctttgtctcttgatcactgttgtattcaggcctacatctaaggtttatggggcccagggcaaaaaggaggccatataccatctgtctaaatatttaaaaattaacaaatccagctagtaagccattaaagaagtgttttttatcctctgccatgagataacttttttaaggacaaaatctaaatgtataggtgaagccctagtttttacgtgattgaaaattgaccaaatatcaaagacaacagctcttgattattattgtacatgttctgttattgggctgatgacattttagtgagttttttaaaagactgaaatatttcttaaattattatatatttattccaattaagttattttttctcatcttcatttcagtaaaattgtcatgttgttataatcaaggtggtttttttttaagatactttttgtctattggcagttatgatctaatacagggatctgcaaactaaggccccagggccaactctagccactccattcacttatgcattgtctgtgattccttttgtgctagggcagtgacagagaagagtcgttgtaacagcccaaaatgtttactgtctggttctttacagaaaaagtttgctgatccctgatctaaagaattagaaattaaactgcatttgtatttaaaatgtatacaatttgaatatattttcctcaagcatataaattaattatacattgaaaaaattaaaattaatttttaatgtttttaagaaagtcatatttcttgcacaatattcaaaattatacattagaatttaaaaagcaaaatgaagaatgggttagctaataaaaaacatttaaatcaaacatttcaatgtagctggatttttatgacactttaattaaatcttattaaatattttataaaaataaaacaatttctagttttgtgttcaatgcccatctagttgccaatgtgaagacttggtatcagatttcatgtatgttatgttgcaacctaaatttaaagatagcatcaatcgtttaataatgcaaaatatgcctaagttactatgtccacagctgtgaatattgcctgaatttgtgagacctctgaactatgaaatggaaccagcagattctgatgaaagaaaatagatacggtattcagcactaactactactactactactactactactactactactactactactactactactactgcaatctctttatgccagaatctgtcttaatcatgaattaatttctctttttcttatttatgcctttccactgctcaaatcctgtccctaccacaaaagcagtgtacatctctattgtctgcagttttgcagttgccatatccacaacccacaacccttcctgacattcagattcagtcaccatttcttcaatgaaagtgggcaagagaggtgtagaaacattttcctagggcaattacatcatttggcacaagagtaagagttactggttgtgtctatgtgaggcaagcaccaaatcctgagccacagaagccctgatgtgttttctaatcacttcacttatggtgattagaaaatgcaaaatattttgcaaacaactttgaaatatgtttgtgataggaaagcccctctaaaatatgtggttcaaaatatatcaaataataaagcaatgtaatacaaacacatggcctttataagttatgaagaaattgcaggaaatttcaagaagctgaagtacaaataaagtccccattacctgattacaatgcaataaattagaaatcagttttatcaaaaccttacaatctggatattttaaaactctttgatactctgggaggccgaggtgggcagatcaccagaggtcaggagttcgagaccagcctggccaacatggtgaaacgttgtttctactaaaaatacaaacattagttgagtgtggtggcacacacctgtaatctcagctatgaaggaggctgaggcaggggaattgcttgacccaggaagcagaggttgcagtgagccaagcttgtgccactgcactccagcctgggggacagaccaagactccatctcaaaacaaacaaacaaacaacaaccctctttgataaacaactcttaattcaaagaaacattttaaacccaacttgaaaaatatctagacaccattgataatgaaaatataacacatatgagctatgggctacagctaaagcctcgcttagaagaaaatgtatacagcctttaacacctgaatatttaaaaaagaataaaaataaaggaattacgcatctgacttaagaaaggaacagccaaaaaactggaaaaaatgcagaaagaactaaataataaagataaaaataagaaattaggttttctaatttaaaaataaatccataagaaacataaataagctcaaatactgtctccttgtgatatggtttcgctgtgtccccattaaaatctcagcttgagttgtatctccccgaattcccacgtgttgtgggagggacccagggggaggtaattgaatcatgggggctggtctttcccatgctattctcatgatagtgaataagtcttacgtgatctgatgggtttatcaggggtttctgcttttgcttcctactcattttctcttgctgccaccatgtaagaagtgcctttcacctcccgccatgattctgaggcctcccctgtcatgtggaactgtaagtctaattaaacctctttttcttcccagtcttgggtatgtcttcatcagcagcatgaaaacagactaacacaccttgaaaacaatgccaagcaatgaaattcacttactcaaaaagttagggagtacaaaaacaaaaaatggaaagcagacagtcccagtggctcaagcctataatcttaacactttgggaggccgaggcagctggatggcttgagcccgggagttcaagaccaggctgggtaacatggtaaaaccccatctctacaaaaaatacaaaaattagacaggggtagtggcgcatgccagtagtcccaactactcaagaggctaaggtgggaggatcacttgagcccaggaagtttaggctgcagtgagccctgatcgtgccactgcactccagcctgggtgacagacagaggacagagtaagaccctgtcttaaaaaaaaaaaaacaaaaaacaaaggaaaaaggaaaaagaaccatggctaaagaaattaaaatattcaaaggagaacttttgcaaaagtaactgaaaatcttcaaggaatgtattttttaaacaggtaaataagttacccaaacatattcaacaggaaagagaactttaataacatcggaaaaatctgaagcagttatcaaagatcttaaaaagccacaggtctttatgctttcagaagcaaataattttgcatttcaaggaactgataatgttaattctatttaaaaatgaaaactggtaaaattaattttatatctgcataatggaatactgtgaagtcgtcagataggatgtggaggttctgtgtatagttatggaacaatctacaaaacacatgaagtgaaaaaaaagcaagatgcagagcattgtgtctattataccgacatttgagtaaaagtgtgtgtccttgtgcatatgtgtatgtgtcatacataactaaaggaacgcaaaagcaacggattacaatgattgcatctgggggaagggactaggcagctggaagacaggtagagatacttttttactcatgcccttttgtactttttgaatttgatacacagtacatgtattacatagtcaaagaattataaaagtaaacaaaattgcccatagcacaaataaagaaaaaaactgccagtgtgtttttatgaagccaatgtaatatggattccaaagtctgagagagacagcacagaatagaaaactataaatcaaactcatttacggactcattatgaaaatttaaagttaataaacaatttatcagattattaaaatattagccccatcaaaagaggtccttattcctcaagtacgaaagtatctcattaataagcaatgtgttaatatactcttaactactatcctgcactacttctcaagtggcagagctatgtgtgaactgtcaatccatccataaatagctatatatctatctactgcattttagcaaatctaaaatgctgtcaagtataagacagcctatttcagaaatgttaaaatgtggaaaactgtttatctttaaatcaatgaagtgtagtatccatccatccatccatccatccatccatccatccatccatccatttttccttcccttccttcctctttgcatttatctgtctaatctatcatctctctatttagaatatgtatatagatctaatataatatctagaatacaagatatattctttagtgagaaaaagcaaggagtagaacagtggaacagttgtccaatctgcatatttttaaaaagaatgtttaaatagatacatagtatatgtgtatatttttccttagaaggatttatagaaaactgtaaacaaaggttacctttggaaagaaggactaggtgaagggtgagtggaaggtgggggtgagagaagggggacttttattttttttctgcactttttgaattctccaaccttattctaccctcattttgatttttggaccatttgcttctttgctgtagcagaaggtgtcggagcactgccctggtacctttcaacatatctgtgagccctgccccagcttctgtgtatttaccttccaatggctgcttcggcaatggtctttgcaggaccaattggagctgctggcttcactaggtctgctgagagctggaagtgcttggagtttaggaacccccaggatggctcttagctgcagagtgattggtgagtgagagtgaaagcccagtttccttgcctctggtgggaaaacgtccctcagaggattctaccctgaatcacaccctcgcttggcttcttgcctttccctgttctacttcttgccacgctgtaagcagtttttcttggaagcccttccttaagaaacccccgcttgtttgtctgggcgctatggctcatgcctataatcccagcactttgggaggctgaggcaggcagatcacctgaggtcaggagttctagaccagcctggccagcatggcaaaatgctgtctgtactaaaaatagaaaaattagctgggcgtggtagcaggcacctgtaatcccaaccactagggtggctgaggtaggagaattgcttgaacccaggggttggagattgtagtgagctgagatcttgcccactgcactccagcctgggcgacagagcaacactctgtctcaaaaaaaaaaagaaaaagaaaaagaaatcacttgttcatggtcttctcagcatcttattctgagacttaagacattgtgacattgtattccactttgaatttatggatatttaaaaagaaatcatgaatgtcatatgtatgtaaataaaagaaataacatactatagaatcaaatgatactgagacaccaaggaaactggcttgttcctaaaactccaagctagaactggctttcttccactggacattcctgtgtcttatggtcacaagaatcttttttaaaacctgacttcagcccctgctttagtagtttcagtaaaaggatacctgcccaccatcttcatcacagccattcattttcctgtacttacttgaagaccattattcggctactcatagctaatgtattacacaagttcttaacaacttctggggctcattttgacaaaacacaaaccatcaattctcagtaaaaaaaaaaaaaaagaaattgttttctcgaagggcagtctcaagatggaattactaatggctgtaaagaactgtgcctactttaaaagggacttgtattgtgattcctcagtagctggcctcagtgggcaaatgaattaccaaaaagcactttgctcatagattgcagtggtgcctctgagtccagagttcattgtcaaataaagcatgtcatttgggtgcagcatctttgcatttttaatcatgtttgatctttcagtcgctcactggcaacaggtctgctggttgtcagtgtgagccagcaaggctatgttgcaaatgtttaagctcctcaggcagtttatttatgctggtaatattcaaagtatttattatcatcctgtctttatcctgaatgtgtgactgcattgagagccataaattgctctagatttgagtggctgtcgacagcatgattttaactgtaacatattctctctgtgtaagtgtgtgtgtgtgtgtatacacaactatatacatggatatttatttttacacccaccaacagggtaatttatagcataacacacatacacacttacaaaaaaagccctctcctgtcatcaatagcggagtgttttctctttggtgtagtgctggctattagaggagaaaacggtgtctaaatcatttatttatgcaagaggagtgtgaggaggtcttgagcaggaagccatcctcattggaggctgcttctgctgccgtcagggcatctcccaacagcccctgaaagaggttgccagatcctctggaccactgtgcctttgtctgaaaccagcccaccatctgcaagatcctgggaactaacttgttagtaactactgatagggggacaccaattttgagaggaggtgtgtatacaattgaatatgataaaatagtaagcactgcttaccttccacttcccctcctttttacatatgtctttttatgaggacactgtccattactgatagactatgttagcattcactttgcttttttaaagggagaagaagatttagaaaagtggggcttaactggggattggactgttctcattcatactggccctcacattattcagagttgacaatttgttaacacctgacagaagacctgaaatctattttttagctcatcaagttgggtgctgggtgcctcaggtgtattatattgtttctgcattttgttgtgttcatgttctctgtcctgtaagatgataagcttctggacagctggaatgatgctttgtatttcacctgtctttccaaagcatgttgcatgttctaacagagtactggttcattgttgatgtgaaataaatacttcttagttggagttcttccaaggtagtcatttagcttatgcttagcccaatcataggaagtaataatggtcaggcagaaagttttagttaaatgtttattaagtagctgagggaattagtgtacattattagcaaggtttttataatttaactttttcttctttgagttgctgatttatgtagcaagatactttattgagcatacattggtgattttcatgttttttttttctctttagctgagaaacccttctttactgggctccaatgtggagaaacaatatgtacaggtgaaaaggttgttgctttgtttgaaacaggggtgaaagataaggggccagcttgagcagtcttttcttcattgttccctcttctctcctactctattttcccaaacactcctaaaccaaatggccagcaaaggaccactagggctcctctgaatatagtttataaaccatttgtctaaaaagagtctttgagtgcattattacatttggttcactattttaaaaaacagacgattttctacagcaaatttagttttactgaaaaactgagcagaaagtacagtacagaggtttcccacaaatcccctccctttgcccacagtattcattatggttaacatcttgcattggattgacacatttgttataattgattaaccaatattgctacactattgttaactgaagtcatccctcgtttacattaggactcaatcttttgtcatagtcctgtgtgtttggacaagtatgtaacatcatgtatctctcgtagtatcatacagaatagtttcactctcctaaaaatgcccctgctccatatattcatcctatggttcaatatgttttaaggtacattaatgttcagaggagtggtggtaatggaatgtggtttgatcctatggaagtttcgctctatcctttcattacagttggaaaaactgcaggtttctgttccctaaaaggggaatcaggatttcaaattacaatcatgatcctgttgtgataactcaggagactactgcagcttttgtattttggaagagttgaaaatttatcagtgaggctaaatgccaaggtaaatttaactggagcgagtgatgccatgcttatttagaatatgttgtgacatatttgaatctaatgtgtattaatatataggcaaaggttaattttgactattttcatgtccaaatctagacttgtccttccttcactgatttgtaaattccgctttccttacttttgggacctgccgttgactttggtgcattgctaattatgcacacaattttagaacaacactgacaatgaatacaaaatattaataaaccaacaagacagcagttttcaagaatcacattatgtacacttactgcctaactgaccttttctgcagttacttaaatcttttaaaaatccatttaatttcaaagccagagtattagcctatttatatgtaaattgtctttaattcatgcattgatttaaaagactaatccaaaagatcttttaccacaagtgacctttttgacgctacacttctgggaaaactgtgaagtggtttcttggtgacctcacatccacctgtggtacaacacatgccaactctggtctgtataaataactcacaattgtatagttttaaaccaacattgaattattaacagtataattgttttagttactatttccacaggaccatttacagggatgaattttttttttccttctggtgtctttctattttcatcctcaaccaacagatctaattaaaagctttactaagaaatgtctgttattcaagggacagagtcaggtgtttaatagttactgtctccaaagaacttagatgtcagagaagcttaaatttacattgctgcccaccatacagacctgagaatccagagaatcttagactcttaggaaagcaaacggggcaggttaaccttggtattttgtttgtttgtttgtttgagatggagtctcactctgtcgccaggctggagtgcagtggcacaatcttggctcactgcaacctccgtctcctgggttcaagtgatcctcctgcctcagcctcctgagtagctgggagtacaggtgtgcaccaccatgcgcagctaattttttgtattttcagtagagatagggtttcatcatgttgcccaggatggtatcgatctcttgacctcgtgatctacccgccttggcctcccaaaatgctgggattcaggcttgagccacagcacctggccaaccttcgtattcttgttgtgctctctctctcctctgtctctctctctctctctctctctatatatatatatatatatacacacacacacactctctctctatatatacatatctatatatacatatagatattcaactctcatctctctctctatatatgtatatattttttttcaactctcagttttctgcctgtgtttagtttaccttagggaatgtctttagccagtgtttcacaacaaattatctttcttctggggatacatatattttggaattgtctagtccctgttggtggtggctgaaatgcaaagcattttagtttcaattttagcctatgtaaaacatttgaagtaaaattgaatgtgccatatataatatatatttatatttgtgtatctattatttctctgtcaggatttttacctgaggtacacgataggaggccacaaatgcccagaatcttatgcaaatgtgtatgtgtatacatgtatttatttgcatgaagtgtcaccacactgaacaattctatggagtaggaatattcacttaggctatactgtgaatgccaacaccctgtctcctgccctggagatgcatagcacagggctgtatatatgtacatacctccctttgtggcaaccctcagcccctagtatccacgtcttccttaaatttttacaacaggtgtataacaccaaaatggttaaaaactactaaacatacatatatacacatgtgcatgtatacacacaaatatgtaaaatatatatacacatatacattctatgtatatatatagttgatcctgatttttcataggaaattgttgtataaagtctccacaaacgctgaattagcaaataatgaaccattgcccctaggggaaatccagggttgagttcctgagagcctctgattacaatattttttttgtttttaagagatagggtctcactctgttgcccaggctggagtgcagtggtgcaatcatagtgcactgcagttcgaactcctgggctcaagtaatcctcccaccttagcttcccgagaaaccagaactacaggcacgtgctactggctgtttcttcacaacatttttgttaattgattaatatgtaaactttttaaatgtttacttttatttaaagatgccttatttaacatatagctaattcattaacactgaagtcatgggacacagcctgagctgtttaacctgagcctgaatgaagcttctatcactcatgtttcctctgtaaggcacatcatattcttcttgtactcaggaacaagagacagcacttcagcactgttcttttggggccattatgtacaaaaatgcaaaagaaaacccaccccaacaacctggcatttaatagatcagaaaaagacccttgtttacagtatgagagatggagcaagaaggtggagctttgctttgttctgcttcacttggggaatgtacatgttgggtgacaaatttttcacttctctgtgatgcccaaaaatgaccacagaaatgtggcaagtatcgatgttgaggttacaaatgcattttattgagtgggcaaattcacaaacacagaatgcacaaagaatggatgccaaccttatacacatttatgttcacttacctgtttcatgcaaggcatatgcaagtgttggtgattttggggtgaacaggcagacaggaacactgccttcatggagcttgcttgcatactgacactggacacagatgttaaacaattaattacccaaataattacctaattacaacagtgatccctgttctagtggaagggtatcagacactattagagcatgtgacagagtatccagcccaggatgaggggtccaggagagcttctctgaggatgtaacatttgagcagtgctcagaaggatggataaatatgcaggaaaacatctgtatgtgtaaaaagctggagcagggattttatgctaatttgttttccaatcccttgctcttctcttctaggtaaagttggtagcatgtatataaatatattttttctaatatgataaaaatttctctttatacccacatgggtcattacttggaagctgctgctctctatcccttccttgggaattgtagctagaagaagctgacaaaataatatatcacacaataaggagtaaaatatttaaggatggagacaccctttctcctggccaacttctgttttgttttttttttttttctttttgtcttatttccctctttcctgcttcttttcctccctttcttcttttaatttgccttcctccctttcttcttttaatttaactcactagattgaattgaaacacaagttttatcttcttttatatactcagatttagtcatatatggatgtggcttttgatcaaataggaaaatcagcccattcattcattcattcttcattcacaagtatttctcagatccctactttgtgacaggccctgtgcaaagcactggtgaaatacaaagatgaaaaagacatatacctattcatgcttatcttctcttagatttgtctgaaacaccactaaactttttagatgataattataattatatataaaagttaattagacacttattccatgccaaggactgtgatagcattttacatgcattatcttcacaaggttcctgtgaggtacgttttaggattatctccattttagagatgaagtaacagactcaggtagggtgaaataacttatttgaggacaggtattgctaagtagccgagctagcatttgaaccatctccattcttaagcatattacactgcagtgcttcctgaaatccttatgagtgacttaataactttcaaaattttgttttaagatatcaactaaagcaagattataaaacttaaaagattttttcatttccataagttacttattggttatggccttttttcttagtttcttgccagaaaatgcccattgcctctccatgccatcttcccagttttataaatgagaacatttaggcaccaagtagttaagcaacttggctaagttcaagttgttaggaagaaggacgcctgggacttcagcccagggctgtctcattttttactatcaatttctaaaaattaggcttttaaaaaaatattgcttttttattctgatttcaatactaattcacactgaatgtaggaaagttagaaaacttatacacatgaataacaaaacatgcagacattggattcttctgtctttatctctgtagataatctctttgttactaatcttgaaaagtgctctctctgtgtgtgtgtgtgtgtgtgtgtgtgttttctgtttgttgcatttgagttagctttatttctagcatgaagctgtttgctcctggagggaaggaatgatttcatttaattctctgtctcctacagcacccatcttcttactaagaatatggttggttttcagcaaatacttgttgctttaagtggaattgaaatcacttactgcccaggatactctttttgccaccacaggatgcagcaatacaatcccagaggcccaagtcagacagggaatcttggttttatgtcaatttcaaattttgccccctgtgcctggggaatagctcaattgctgtctttttctctgggataaaacttagaggacaccaaggtcaactttcagacacagcagagagccaggctgcaatagtaaataaaccctctgcaagtccatggctaatatcagtacagtgaatgttggcaaaatgaatccagaggcacttctcttcgtgggagtttaatatactctttgcctgtggcatggtaaatgggcccatggacttccaccggtctgcagattctatcaccacaacagaccactcctattgttacattttctattgtcaccaaagatcttaatcaccacagccaagggctagtctcagtcatcactttcagacctactccttcttcttaaaattatccttttggcctctggactataactctgtctctgcttcttacctttgcaactgttatttctttatcccatttttcttatcaagaattctagctttagttatctgctctgtgaggaaaacacctgagtccattccagttacacctctggcttctgttcagatccccatctttctggtggacaggggctggtaggggctcttacctccctgtgtttgtccatttgggctgctaaaacaagacaccttaaaccaggtggctcataaacaacagaaatgtctgtctcacaatgctggaggctgtgaagtccagatccggtgtctaatgagtgcccattttctggttaatagaggatgccttcttgctgtgtcctcacatggtgaaggggtagaattctggtcttttcagctccttataagggcactaatcccattcacaagggttccaccctcatgtcctaatcacctctcaaaggccctacttcctcatgccatcacattgggattagatttcaacatataaattttgtgagggacacaaacattcagtccataacctcccctaggctttaagagatgaggggaagaaacatttatcagagcctggaaggaggccaagtactgtggctcatgcctgtaatcccagaattttgggaggccgaagcagacagatcatttgaggccaggcattcaagatcagcctggccaacatggcaaaaccccatctctactaaaaggacaaaaattagctgagtgtggtggggcacgcctgtagtcccagctactcagcaggctgaggcaggggatcacttgagcttgggaggcagaggctgcagtcagctgagattgtgccactgcaccccagcctgggtgacagagtgagactccatctcaaaaaaaaaaaaaaaagaacctggaaggaaaaagatctgggtagagcaggtcacctgagaacagccttcattttcagaggatggacacagctgtccggggcctcttacaggttgctcccaatcctggaatgatgtaactctcaccagggcttcccgtggacagaatgcaattagaagctagagggtgcaggagcctattggcaggtctatattgatcaccctcccaggaagagtcaggatgaagaaagatggggaggggatctggatggatgagcagaggacattcataacaaccactgggactgatgggcagttcacgacctgccaaagagtcactgaatattaaactcctgaggccaggggtgatatgtctgtttgaagaaaagtccatagtgcttttattcttttgtaaaatattaaggaaatcactgtactttggggtcattaagtaatttgactatgattaaatatccgggagaaaggggcattgggattagaacctagtcttctgagcccttgccttgtttgctctccccagagcctgtgtgctcccctgtgggttctgttaaagagccacacctgcatcatcatctccattttctttgttttcaaaccttatgaaagagacaactgttgatgaaattttattttaaaaccattagtccctcttttttacacagatgaatcattaaataaccaattagttataaaagtgatttatcaggaaatatagggctttttccttaaaattcatttccccacactcaggtataaacagagaattacacactgggacaatttttacaaaattaaaaaatcacaagtacactgttacagtaaaccagggcctcatcaatcactatttaagaaaaccttggccttgttctttatccactgacaaacaaatttctatttcttctggcttcctcttatctcctttgtgggcatctgtagcatgtaaggccttactcctctgacctctgactacagactgtgggctatgttaaacttccattaacttatcgttgttcaatgcaaaaagccacactggtgttccttggctctctctctaatgacctattgaaggccctgctatggtttgaatgtatgtgtcacccatcccccagacaaattcgtatgttggaacataagacccagtgtgagcctgggcaacatggcgaaactgtttctacaaaaaaaaaaatgcaaaaattagctggtggcgcactcctgtagttccagctacttaggaggctgagacaggaaaatcacttgagtctggggaagttgaggctgcagtgagctgacattgtgccactacacatcagcctgggcaacagggggagaccttgtcaaaacaacaacaacaaaaaacaacccagtgtgataatattaggaggtggagcctttgaggtgattaggtcatgaggacagagccgtcatgaatgggattggtgcccttttaaaagggcttgggggaactagctaggccctttatgcctgtttacccttctgccttcgtccacgtgaggatacagaaacaatgtactgtcttggaagcagagagcaagacttcaccagacacttaatctactggcaccttgaccttggacttcccagcctccagagctgtgagaattaaatttctattatttataaaatacacagtttgtggtattttttatagcagcatgaatggaataagacaggcccacaggggaaaagtgtggccagtgctttggtattcatctccttgctgttttgttctgttcttcttatagccttacttaagggccgaaagaaaaggaacttgttgctagagagagtgtgtcagggatagcatcaagcattgtaactggcttctctcaaaaaagatagggttaatttttccactgtaatgatagtcccttaataccctcatctggtccttgcctcacagccatgttcttggatttcccttgaaccagctctgtacaaatttacattcccatcagtagtgaacaagggttcccctttctccatatccttgccaagacttgtctttcatctttttattattgccattttaataggtgtgagatgaaatggataaagaaaatgtgatatatatatatacacacacacacacaatgaaatattcttcagccttaaaaatgagggaattttgccatttttgaccacatgggtggaccaagcagacattatgctaagtcagctaagctagcaaagaaaaacaaataccatatgttctcacttacaagtggaatctaaaacaatcaaactcatagaagcagagagtagaatggtggttcccagaggctgggagtaggggaaatggggagatattggtcaaagggtacaatgattcagttaggagaatcaatggtaggtatttgaggtgatggctatgttaattagcttgatttaatcattccagactgtatacatatatcatagtatcactttgtacttcataaagatatacaactataatttgtctatattcaataaaatgaaaaaaatgaaataatttctgaacaaagtgatacaagtgatttactaccattggtgtcctacctctttcatttttcagccaagtggtacttcttgttattttatttgtagaagaccttaagcttccctaaaaggcttcaaagtattttatattgtgatattttcacaatagacttagcaaagtagagagagctagcaataggatatgtactttgaacatggggagattgggacctagagaggtcaagtgactataaatgtatccaattttaagttgaaaaatagtgaagaactgcaggttgatgggaccatttccagtgattcattatttctcccttttctatttttttaaaatattaacctccttactaatctctttcctcaggacttgatatgccatttgtcctatattgtcaatggttttctttgggtctatagtttcttcatgagtgtccatttgtgtgcttcttgactggtgcagaaatagtcttctagtttttctgtgtgcctttgggttcccagtatagcatagtttttggcatatggtaagctcattggtaaaagaatagtttaatgagtcaataagtgaatctagcacgtgtagatgctaaagcttgaaagtcagcaacactactattttttaaagtattaaactattgaaaatgggctaacgtgtgcattctccacttatctgctttggccttctccctcctggagaatggaggtgcactggaaacaattgttagttgttggaggtgttgcaggacttttccttagttcagctaaagagagggtccttgtctgtcccatggccaagaaaatttaggctcgcagactgttggagagggtgagcaaggttttattgggtgaaaaagaagacaaagggggaaccgggagcctctgcaaggctagagtccctgatagagcacttcctgcccacagcttgaattccaggttccacacaggaaaaggagggaccaggctcctccccagtgcaaacatggtgaactttctgaggctctactctagtgcacaggctgactggaggtttttcggggaccccctcccacctagctgtctcattcctccctctaaagaggtacatccagctgccgtttagattaaggataaggatgaagactgaccttaactgcttcctgctgagagggggcgctgttttggggaaacagcagaggcccatctaagggttcacagcagaaagggccattgtcagaggctctgtttgcatgattgtttagagtttaatggcctgaaggcaagaacagacaaaccaggttattagaaactatgtatcaaaacgaaatgaagggagggtaaggacagctcaaagatcctgaggccttttgccagtttgcacacgtagagggaggccaaaagcctgactggcaaaaaaaactttacccttttgctggcacgttgggcttctgggtccccttcccctgagcccaatcctaagctaaccagtttaaggtttgggaaactaactctttctagtttggaggatgcatctgaggagagtgccttgtagtatggagacacaattacctattagtgaagagagaacagaggagaagaaaggcaaaaagaaggtgccttttaaaggagtcccagaggttcaggatgcatttgaaagggatacagactgaagatgaatggctacccatctagaaagaggggagcaggcatacctggttcccttttcttccagcagataccttaggtatgtgaggtagagagggaagagcatcctctttccatcttctatccttgcatccccaagttccagtgaccttggtaggtgccaccatgggtgttaaagcaacttgcacccatgaagcaggggggcctaggggtgggaatcatccgctcttacccacgtatgccctatctcccctgctgtcagtagccttggagttccgtagacctcatttatgccatggatattaacgtggcctttatccatgaaacaggaagtttggggttggcttaatcagcaggaatcagtcacgctcacctgtgctgtgccttttaacttctgttgtcatttgcctctggatccctaagatccgattttccttcctaaggctttgatgtgaagcttggaattcagtctgggacaaaaatgtatctcggatggggcattgcatggcctccttatcataagacaaatgctaaagtgaagctgtggaacccagttctcctccaacaagagagagaaaaggatgtcttgtgacacacccagataactggtagctatagttatgcttgccaggatttggatacgtgatgcttggctttggttagttcacttggtcttactttcccaaaaaggaaacctcctggtaatgggcaccctatttattccatcacctggcagggtttgcaggataattgttcagagctagaatattgatccatatttctacattacccatccctcctgttctttctgagctgcagccggagattgctgcttggttcacaggagcaagcagggttggtctaaaaggtagatgaaaacttaaaaacaactaatgagtttagcatttaatgacaaatgtatggcaaattttggaacataatttctgtctctccagtcctcatttttgttaaaaaaattatggtaggactgagtgctttgcaaaatagactttagtcttacacttggcctgattatttgcataaagtgcagcaagaataactatttctacataggccttttggattggcactgatggaaatgttttccacaaggaatcacagataagaccttttaaagctgagcctagccatgggtttgcatcctcaaatacctgtgagttgggtgatcctctcctcttaaggtcccacaataaacttggagctcttggacctgctagaaagtgacattctttactgaccacaggtcaggaaccctgtacagggactgcatagacaacagtatgaggccagtttccccatggggcttttattggctctgcaagttgagcttgactccttaaagggaagcataccattccagtcaaaaccttggtaaaataactactttctccaaatgtgtcctgctgcaaaagaaaaatggattcttattgcactgatgcaaacaactatattgccataacaatattcacagatagtttccaaattctagaggaaccaggcagagagaaacaaacacgcttcaaactttgttcataggagtataccttactcaattgttaaaggctgtaaatagttcaaaataagtttccttgactctgaaaaatgaaacatggattagcaatattccaagcaaaagtcaaaaaggttgcttcagcttcctgagttcagtccatttggctaactcttgttttgcttgataatcatgagcatttcagcttttgagtcctgtacattttcctgtatttcagtgtcacaatatccaaagttatcagaagcctgtatttgaaagcacctgtcaaagtcctatagcttattataaaccatcttctgaaaaagattaaagcaacaattgtctgtgaatagcaaaatttccagggtagttacaattagaaacacgactgacaaagaagtttagttatctccgtggtttactataacttaacataaaaaccttaattatggttgatagcatatactcagacattagaattttagaaatcccatacaattttggaacatatattggcattattcacccagctataacctaaagaagattgagcatcattttggcaatcccatgtacctaaacatgtcaaataattctgtttacctctcttagttctggacacatcgggggccctctgaagtatttgaaaagccatgtaccagggaagacgattttgaaactgaagtttgactttgggaaggctgttaaatgttcaaggtttaaaacacttgatgttatgaaacggaattccagattactgaggactaagctctgatttttttttaatattgcccaaattcctatctaaggagcctggggagtcatggcttacaaaccataaatgttcatcagatgggttttatttaaccctgtatatcgtgacttactttccaatctgactgtggcataacgaggaaaaaaatcaaaatgttttacctcaaaatatatttccttgccataccttgaagttgccctgcaacgtctcttgtgggaaaaatccacattttatagagaatccccttccccctttgttttcattcctttctctccagatccaggagataatcaactaagagccaggcacccttttaggtctgataagaagcattttataaactgctctctcttaagtctgctatctgagagcttcctctgcacaataaaatttggtctccacaatcctttatcttaacctgaacatttcctttctattgatcccaggtcttcagataaactcaaccgtcatccagaaaaatgtttaaatttacctatagcctggaagcctccgctttgagttgtcctgcctttctgaaccaaaccaatgcatttcttaaatatatttgaagtctcatgctttcctaaaatatatcaaaccaagctataccctgaccaccttgggcacatgttctcaggaccttctgagggctgtgtcacgggccatggtcactcatatgtggctcacaataagtctgtaaaaatattttacagaatttgactccttttgtcaacattaccaaaagttatttattttgtcaaaatgatgactcagaaattttgaagaagcgaaaaccttttataaccctttacaaattttgccaaagagcagattaagattagcaccttaggaaaacctcgttatgcttttacttcaatgctcaatttacagaaaaaccatataatacccttggttgaatgtagtcagtatgttcacacagagaacctcttctgcaagattaatttccacaattcttccaccacttcttggaaccttcagctttttcctaatgtaactcaaaacaatccttaaccctaggcaaaagtttacatttccatgacttcttataaccttttactgaaaaacacattttactgttctcatacaccttgcatgtaaatctatttctagtggattcaattaactcctagcaatttttaactgtaaactaaaacttgttaagttgctttaattgtgtgctaactgcagccaaggtttgccttcttagttaagggtgcggttagttccgtgtgtccccaggccttaccagttgtgaagctggcaagtcaatatagttctgaaaacccaaaaagcagtttgtaacctcaaaacacttagcaaaccttgcatctgacctgcattatttagcctacctatttacattttgataatacctgcatttgaccaatagtttttaagactgtttctatttcttaaagattaaagtcatgtgaactgaaaggtaccagactttatcttccctttaaaaaatattagattcaagcacttgtctttctttaggctgtattaattagagttctcttgacaaacattacgtacagtacacacacaggcaggcagaagaaaacccagttgctgggtggggccctttaagagaaagggctaggaaaacatgcagacattgaatcttacagggttcatcctctcaaggctttgctaaacaaatccttgccacaattaccagccatgccctcaggatataaaacaagatggaggcttgatttcacaaccgaaactttgcagagaatacactgacagttgttgggggtgggtggaggctagcctagtacaacatcttctaaaagaaaaaaaaatttaagttaacttgctgatggggtagagaaggggaaagaaaagaaacagtttaaaagtgcctgaggaagaacctcatatttctttgcaagtggttcctccaccagggagacaaatttaagcttaattactgtctgatagagttacatcccttggccagggaaggggaaggctgggacagccaggagtgacggggaaccagccagcaggctgtgcaggacacttaggccatgtgtcccagccccggcatggagtgaggagcagtgggcagctgctgctcgccggtccatctcaaaaaaggaaggaaaaggccacggggatgagaagactcagaagggagagggaaaaagaattattggtttgcatctcacttaccccttctcgagtccccacgttgggcgccaaaaatattgcaggacttttccatagttcagttaaagacagggtccttgtccgtcccacagccacgaaaatttaggttcacagaccgatggagagggtgagcagggttttattgggtgaaaaagaagtaaaggggaaagagggagtctcccaaggcttgagtccctgatagagcacttcccgcccacagcttgaatcccaggttccacacaggaaaaggaagggccaggctcctccccgctgcaaacatgatgaaattcccgaggctccaccccggtgcacaggccagttggaggtcttctggggacccctcctcacctggctgtctcacaggctggagacttgggtggttgtccctgctccttcaatttttacctggtgtttacaggtggagatgtgagtttaccatttgtactgagctttggtttcttcctctatcaggggcatttaaacattccttatttaaaagccaacatacactctattcatttcaaatggtgatcttacttagatgtgtttttttaaaaaactaatatgaaaggagctgcactggttgaaacaatgtcatgaatttggtctgcattaacacagtttggaaaccactgctttataaagatgggcatagtaatacagtagttccccattatctgctgtttcaaagttttagttacctgtggtcaactcgatctaaaaatgttaaatggaaaattccagaaataagcaatttgtaagttttaaaatgcatgccattttgagcagcacagtgaaatctgagctgccctgctctgcccttcccagtgtatgaatcatcccatgtatctgtgatgtctgtgctgcttgcccgttagtgacattatagctagctctgtgatcagatccactgttgcagtatcacagtgcttatattcaaggaacccttattttacttactaatgattccaaagcacaaaagtagtgatgctggcatctactttattattagttattgttgttcatctctaactgtgcctaatttataaattaaattttggccaagcacagtggctcatgcctgtaatcccactctttgggaggtcaaggtgggcagatcacttgaggtcaggagttcgagaccagcctggtcaacatggtgaaaccccatctctactaaaaatacaaaaattagccaggcgtggtggcaggtgcctgtaatcccaactactcgggaggctgaggcaggacaattgcatgaacgcgagaggcagaggttgcagtgagctgagatcacaccattgcaccccagcctgggcaacaagaatggaactccatctcaaaaagaataaattaattaaattttatcataaatatgtatatatagggaaaaaacagtatgtatagggtttaggactatacaggatttcaggcatccactgggattcttggaacatattccctgtgcacaagagggaactactatatctactctgtccagttctcaagtctgttaagtatcaaatggaataaggcacgtgaaaccattttataaaatttactttgttctatccattatgatgtcatcatgaagataattttgccattttcgtatcttccttaagctcatccatcaaaggtgtaaccccaaatccagactgaaaattttaaatccttaaaatgagtagcccatccagtaggaatgttttaattctatagaagaaatgagttgagaaacacttggaaaaatactaatcaagaagatgattaaaggcaaaatgatggtccagctttatgaaagaaggtggtattaagccagaaatcagactggtattgtttggcatgaattaaacttataataagtcacaataatttctctgtagctatatagtctgggaaactgtaatctagttcccaagtgaataaactgtaaggccaaagggcaaatagtttaacaaaagggaatcagatgattatcttgtaagctagaagagcaaagatactgtggcttaattacatagcttggtaggaagctctagttacaaccaaagtcttaaagtagttgtctggtcatttgcaagatactggaatggtttaacttatgagaagagagaagacacagaaaaaaaacagaaattctgtaatggctcataaattgttgctaggggaaaacaccagggaaaatgatttaatattgtgattataaagactaatgcaatgaacaaggaatgtttcattagtgatcaagaaaattgcattgacgggtatcagatacccatatgattatggagatgaagtctagggagatgtttgggcttaattgggtacagagctacagggtacactaataaataaatattcttggttttgaccttgggataactgttgcgttttaactgtttcgatgtgtctttgattttgaccatgattgtgcagatcgtaacccttaaattctattttttttgcctagaatatttgagtaaagtctgactctttgcagccttgaaattctgtgaccacccagtgggttcttcctgcctgctacacaaacagagaccatggaattgcagtaaagaaagagtttagttgacagaaggccagccacaccatgccggagatggagttattattcaaatcaatctcatagaaggcttgtaggttaggggcttttcaaaggtagtttgggcgaaggcgcagggatggctatgcaatgggtgtttgctgccgattggctgggttggagatttaatcatagggagttgaagctgtcctcttacactgagttgcttctggccagaggaaccatcagttggtgggtccaagtagagccatgggtgccagacatgcaaaaaacctgaaacagtatctcaaaaggccaatctacaatagtgatgttgcctgcaggagtaattagggaagttgcaaatcttgtgatctctggaataatggctggcaattgttcatgtctgtaccttagcagcatccaggcatctctccttccctcagttggtccctcattagctttacaaaggcagttgagttggggggaagggttattatcatttaaactgtaaagtaaatgtctcccaaagctagcttggcagcttgaatgctaaagacaggaggcagatgggctagatcagatctccccgactgtcataattttctcattgatacaacatttacaaagatgatgtcaattcccctattatttttccatgaaaccacacaggtaacttggtattcgtattctggttagtgactttacctactcagattttgattatgcctctatgatgtcaaatatatatatatagatgagaagtgaacaatctacttaatctatcatctggatgtttcatttctatctcagtgataatctggatgcttctgcatatcagactactcatcaaagtcctgtgtgcacatcatgggggcaaaaccattccaaattccaactgcaacttttttttttcttctgaagaatgcagcttccaggccacagatagtcatggcagagtctagacatatttattggttcaactttagtttatagcagaaatctttgtcaatcattgtacaccacctttgttcttctctttccaacacttttaagaacctgtcagcagtgccagtgctaatctgctgttgcctggattgggcactcctctgagtttcctgcagaagagagccaaaattgtgtctgagattttcagcttgatgacatcttggcttaataaaaattcttgaagaagagaatgtgaatttttttaaagttccaggctggtgaaaatgaacaattttgcataagaaataaatccttagcattaagataaatgagaagcactgctgatgtgaaactgagtttgctttgacatagataagggggctaagtgggattctatgggaattgacacactggatctaaatctttttttaattactgcatcaataaatgtgctttttcacccccttctataagatgactatttaaatactttcctgtagcactttttaaatgactgtattcagtggtctcacttgccctgtgctcttaaactggaatcctgacaaggcagtgagacccccctctcaggaagtaggccatgtaggcctctgcaacgtgtctgagttacacagtcactgatcaacatgggaaatgggacaatttctggcattcttgccttctttaacatgcagaccactccgttcctgttttgaaatgactatgccagatatttaacactttggaggagttttcagaaagagtattgatatgcaaagtgtaactcaaaaaaagcagacaaaatgattgttgaacagtgggatagagagagagagagataaatattactttcaaagcataggtgtgtccagggatgtgcttccaagttgaaagctagatgaagagttaggcttttgacttagccaaagatgttgccatgttcactgacagaaaagaatatttcatacaataaataggctagccttaggctaagaaagaagattgagttggaaaaggaatgcaggtgggattctggaaataggagtcagtttcattcactgcttatggcttaaaggtaaaggagtaggttgcagattccacagaaaaaaatattgctagattagactttcctgagagagaactgttaggttgtgaatgattaaaacaatctttgcctgggtattgaaagtgggagaaggaaaatatggtcaggagcattagttgcaaacaatagaatgggctctaatttaaatagagaaggaatttattaaaggatatggggcatttggaagaatcattgtagacccagagaaataagcttgaggctaagcttttgggaacaatgtccaaaactatgttgcagaactggtctggtcagaaaacagccattgacatgctgttgactgcagaacattttcttagaactgggcttatgaggcaattgtcaccatctacttactggataccacaatgttttcctgactgtaacatctaggatacgaaggatttaattttattgcaatttatcctaacatccccaaatctggatacctttctcactgcctatactggaaaaatgaatgtccacacatagcctgtttttcctcattgctcacttccacagtgaagtcttgtgtggcctgagaagaggagagcagaccgcatgcctgctccttagctgcaaaggatatgagttttctgaaattccctttgaaaaggaagaattcatgatgtggagcaaacattattatgagcaagaatatccagaggatattgggcagccacgcgagacaaatttcgctctgatccctttcttggtaccaaatatcaataatactcctttttttttttctccatgtttcaactttcaagttataataccttgctctgacttaacatactctaacttacccttgaacaaacagtccatcagtaattctatccaggaaaccctcaatgcttctgctcatttggggttgctggagtctaaccctttaccatggcacacggcagtagcaggaatactccagaggatttacctgcatggtaggtattctcttcatggcctccattgctgagcaggaacttcatttcccaactgataatcaagactaatgacccctcccaacacaataactccctttttactcagtttgagtggggtgtgaggtgtccaaaatgtccactggacagtttcagcttccaatttcatagaaacactcttgcatctgctaaagcaaactaaatatggcctgaaaaggccatacttctatatttgagtctttgtggatgaactgtaacctagcttaacagacaaaattgaaaacctaagttaatagtatgcacctgtaacaatagctgagtgttggccaatcccagcggccatacttcaaccacacatagactgctgaatgttcaaactgcgttcacacaaggcaaacactgagctgtaaccaatctcactgtttctatacccgacttctgattcctgtacgtcactttaccttttttgtctataaatttgttctgaccatgaggcacccctggagtctgtgaatctgctgtgattctgggggctgcccgattcgtgaatcattcattgctcaattaaagtcctttaaatttaactcggctgaagtttttcttttatcatatctattgttggaagcatttttcacttgagttgtaagacctctacaacagcagacctcaaatttcctggtaaggaaagcaaaatgagtgatttgttctgtgtaatggtgaaaggcactgctctcccctctcccctttgacccctggacatatatattcttggtatgggaaaatagcactataattaatcactagttaagagaacgttctgcagcctgtaggatagtcctttagcttttcagggtgttgtcttttaactggaaccacagccaagttattaactggccattccactgttgaggatggggtactaggtgagactatggaatcccatgagcaccaactaaattgctttactttttaatatatgtacatataaatatatgtacatataaaatgagtttcttagtcaagaaggttctgtgggagaccatcaaggtgaataaaacatttaaggttgttcacagaagcctggcaaacagggaaataattcttattgagtatatgtcttttccaagaagtatacattttcatctcctctatgatagatggggtccatacaaacagcatgcccccaggtggctggagggtccagtcagggtatttttctgtatctttgattcaggattggtatattaatcaggcagtttgcggggcaattttcctctatacagagaatgcagagcaatctggcattctctgacctcatcacttggtgtgcaggtcaggcggtatgccttgccagggcccctcacaggcatgacaggtttctgtttcctcgtagcccgttggcctgcactagtcacatggccccaccttaccacaaaaggtagaggaaatgtgggagagcacattggtattcactgaatcaaaaaactaactctccaacagatttccttattgatgtttctagcaagtggtacatttgggagtggcagtggccagaactggtgaagtccttattggtcagcccatgcaaacctctgtatttggccaccgtagatactaaatagcttttatgaatatgctgattaagctctgagttggcagggaaagaggccttgcctacctagctactgagtgccttctccacagtggggaccttctagtctacattcacatagacagatattttcacactctggtaaaagtttgagaagccttactgtgtatttgttcccttccctttcagtcttcccctctttttcttcctaatgcctcattcatgagcccatgaattaacgtggaacaatacctcaggccaactatttttccaggcagtgttgaccacaagaggtaattatttgaagttttgcccactgatgggatttttcttcttcaatgtcctttagggctactcaccttgagtggggttataatattcagggtccacttcaggctggagctagcttatcgtgcaatgttgtctgtaaagtaggctttatttttttccttcttcaggtaactacataaaaaatgccccatgaagtcttaggtttgggttaaaacagggatagccagagtaagcctaatagtacaatcctgtgtaatctactttcatttgatacagacagctgctgctgagtgcacccaatgtaatagacagtggataaaacaacacccaattcaggttgggcagctcaggccacacagtcacctggtgtcctatcttgaaacattctgtctcttgttggggcgcaatagaacaagagttgcttaacaagagggaaagcctttctttgattctaatctagagcttgccaaagcctctttcttatttctgttcagaagccacagatagtctgatagccatctgatcatctatcatgtgaagacaccaaattttgttaatctgtttctctgctaatggacattttaaatcagttaacagtagattctctgggatatataactagaattgggagccactaggttttcagagtaaatagtctggattagaatctcacttccatcacttaccaggcacatgatcgtagcagacaaattaacaaattctctgaaccttgatttctttatggaggaaaatgggaaatataagttcctacttcatagaagggaggtaagaattaaataaaatattgtgagtaaagacccacaatataggcttgctgatagaaacactctgtgcatggtcatcattgtggtgtctttatcatcctctctgttcttataaactgtagtgagcaaacaaatataatctccattaagacaacatacagattcacttgccttttggttgaaatactatttactttatattaaaatgctatgattatttcttattttatctttaaaatgcctgttatttgtctgttttttaagctaatggtagaatttctgttaacatttgtaggctcaattcaagatgtaagttttgcaagccaaatgggtcagcgatgagttaaatgtgggaaatgctggagtaaagaactgaagtttatataatcatttagcattaggatgagcatgaaaaatgtccaaaaggagattgagcatgccacattccaaaaggtatttggtccatggattatttttacaagggtcactttcattctaaggaatgcaattttagaaatactacactgaactgtgacttcttcagggataaggatcttgtcttgcttatctctgtgttcctactaccaagcccagtacctggcatatactaacatttattgacttgatcaaggtgatgtggggagaaagatctgttttcaactgtagttcctatcatcatctcagtgttgtaggaacaccatgatctctggagtcagatgtggccttgagactcctctaccatttgaaaaggctcccatgttaaagtgctaacttctgggtttatttgagacaatagaattcttagagacaaaatctgttgagatgttataggataaaattattcgagtatggatagtcacaatcttcactattttcctagcttctatacaggaagaatttgagcttcctgggtaaactcccaggtcctccctaaagtaaagaaaacagaaataaaagtaaagaaataaagagtctgtgttgaagtacataagcaagagtggagagatggagacagtaagccggacaggctgcccagattgggtgttagagccattggataagtgccaggaaggagagtgctcctgagtcagctgccaaccacatgaagaattttcagaaaggcagcgatgaggagagaataattttacagtattcttaatgcattaagaatagacatctcttcttaataatttttcatgtgtccaagtatattagtcagggttctccagagggacagaacaagtaggatatatgtatgtatatatataagggaatatattaggaagagttggctcacaccattacaaggcaaagtcccaggataggctgtctgcaaattgagagagagagaagctggtagtggctcagtctgaaaggctcaaaccagaaaagctgacagtgcaggcttcagactgtggccaaagtctgagccactgttgcaagttcctgagttccaaagactgaagaacctggaatctgatgtccaagggcaggagggatgggaggaggcatccagcatgggagaaagaaggcagccagaagacacagcaagccagcttatcgcaccttcttccacctgcatttggtctagctgcactggcagccgatcggatggtacccacccacactgaaggtggatctttctctccagtccactgactcaaatgtcagtctcttctggcaacaccctcacagacacacccagaaacaatactccaccagccatctaggcatccttcaatccaatctagtcgacacctaatattaagcatcacaccaagtaaacctgtaaagaacttcctggatccctgattacatttctctctgtgacaaggtaccgtgactggatcacatggagccccaggatttttagtgtaagtatatttgattcacctttttttctggctttccccctaaccttacccactattctcattccccagtcaacactcgtgggcccctaatcatttttgatgaaatgtgtctttctgttttaagccctgatattcacttttatttgaaagaaagcttggttcacattttgaacatctatgattctgtggcaaattcccttttgagaaggtccagtctcttggtgtctaaactccctaaacttccttttgctaatgtagtagaaagacacttgagatttcctcatgattttcaaggtaacatcattctagaaggtatagcttttagtgctgcccctcacttgatgagaggtcactggtgctggttttgacagcatatttagaagccttcttgtttcaatctcccggtaactgccattcccagtgccagtcttttttctatgagcttcaaatcttgcagttcctctttttaccttatgacatccattcatctaaccaactgagagaagagacattaagatgtttcactgagaccagtgccactgaggtaaatatctgatggcttgcgtagcttaggaaaggcaaatgtttctatctgaaaatcctggtttcaatgctaaatagacaatgcaatatgttacctctatttgtactttttttggtttcaggttaagaatatgatcttgaaatatatatattcatatattgacatgtcatttatataacattatatatttgtacatttattatatattaattatatgtaattatatgttgtatattaacacatattaatatatctataatctcatcctagttttttcttaatcaatacccccttgctctttatttcttataaatatcttacagagtgagtcaaaatatgcatttgttatttctaaagaatgagacttaataccctgagacttataaatagaaagttacagaagggttaagttgaaacttttcttcgtattttttcctgggtattgctctttgctaccccaggtttacattgccactgcttaatagcagtgaatgtcaaatgagcttttaccctgcagtccactgttccattgttaatgcagttcatccacctccccacctacccatccacctacagctgaggaaatcctatttcatgatgaaattgatcctttgggctttgtttctgaaaggcagcctgggagttttctgtatccttgactggattgttataaaaccattttggcagatgcaattacagtgtgtctagtatatgtgtgtgtgtgtgtgtgtgcattttcctacccagataggacagttttaccctgagaaattgatagcatgccccatcaactccaagcccctcaggaatggtgggagtgacaggtgatggagcactacatgatggaaaacataccacgctggatgtcaggcgttaggctttccaatccccgtcgtaccactaatttgctgtgtgaccttaagcaacttagttaacctctctagggctcagttctttcacctgtgaaatggagttaataatacctgcccctcttaactcagcgggctatagggaaaatgaaatgagaccatggatgtatgggcagtttgaaacaaatgaacacaactttttacagaaaaacttcagggtgcctgacagaagggatatctttatctgaagtaaaaagcagtgttaaccggagtagctgatatgaaacattcttccacttcatttcaaattaaaatgttatccctgacaagagagctagcagccttgtaatatgagtcttgatttgtgtatatgctgagcaatgtgcataccccatttttcctgatgtaagggttacctgatcacactccaattttgtagtagccaatacattattaaagaacacagctcatcgccatgtgttgctggatacatacatgggctttagaataattcagacctgggtttgaatcctggatttgccacttactagctatatgtccggtgacaagttttcacccatatgccaaatgggcaccaaaatagtacctaccttcacagggtagagataatgcattgaattgcttcacacattgcctgctatataataactcaataaatgctaggtattggtagatgacagtagctatggaatgatggaggtggttgagtgttttcttcctcatgcgtttttgaactttcaaatgttctataatgactttttatggtcagatttgaagaatattattattttaagtgaatacaatcataacagacttacagtcgtgaattgacagtgagcccaccatgataatgatccctatcatttcgattgggctttgtaacttaacacagcacagcacttttacacattctgtctcgtgtgtaagccaacaagcctgtggagtcaggagtactcatattcccattttgtagatctggaagctgagggtcacagacacctacacagttacacagtgtatgaagtggtgatctcagatgtgtcagagagaattgcattcagtttcagtgaacagaaacccagttagaatggtgtaatggtgtagcagtcagggttctccagagagagacagagatgatcgattttaagccgttcactcacatgattatgaaggctgagatctcagtccaaaatctgcaggttaggccaacacaataaatacccaaggaacagttgatattgccactcaagtccaaaagcagactgctggcaaaattccctcttccctgggggatgctactctttttctaagactgtcaactaattgtcaactaattgaatgaggcccactcacattatggagggtaatctgttttactcaaagtctactgatttaatgatgaatctcatctaaaaattaccttcacagtgacatccagatatgtttgaacaagtatctggataccatggcctagccaaattgacacctgaaattaactgtcacatactgctagaccaaggaggggcttattttccccaagatgcctcaagaagttcaaagtgccagcgggacacagttccttctatctttctgcatggttatgccttgccatgggacttttgtcctcataggctacaaactgactactccatccctgggcatcacaggcagaagaaagagggaaggatcttgggcaaaaggcaaacactaacaaactgtgttatctgagtcttcccttttcaacagacttttttggaagccctgcctatcaaattcttattgatcttattgatcaaccgatatctttttgatgactcctagatgcaagggaggttaagaagctgattattttttatctaagttaaaaaagagagagagagaaagaaaaactcagggcaagaagtggagaataactgggtaggcaagtggtggcatcatccacaccaggtgttctgatgctacatcatttatgttttacatcccaccaaattgctcaccatacacacatggaggtgtctatccttgattggactgccctttatgttaatcactgaggtctctttggatatgtgaattgaacccaggatcaatgtgaagtcaccttcaatttaatggaagccggtagcaaaggaaggataaatttgctgggcattactttttcttttctgactcctgatgggctaagtagagaaacttttcattttaagctgatggaagcagcaaaaaatgaaaataaggatgaggtgtgaggggagggggcgggcattggtaaatgttcggatagctggtatattatatgggccaaatgatttttcaaaacttgtttgaattatttattatgtcctagctacagggcctgaagcagtctgtctcactatcattgtcacagttgaagtatttaaagccgaaagagagacatctgtagcattggtcttttgtggtgtctaggaatgaaaaaaaaaaaaaaaaaagacatggaagaaaatagtgtcagtttgtattagaacatctatgttgataattgcttgattttgttcttttttcaaatcagacattcaaagggtctcctttatacttgcaagtaaatatttcgaaagtcatttagtgaaaactcatttggaatgtaaatagaaaccatgtgtcacattattgaaatgtgaccagaacagtgtctgtcttaaaattttgctcatgaagagcaacataaaaaaagaaataattttttatctgttgctctctctgagacatgcatgtgctcatacgcacgttcactcatacatctgtaacaccccattctgtctctatgttatcttgtattcatttcatattcctttctcaatatcactgtgaaaccactttgttgtataatttccatgtagctcttttggaatttttgcaattctaattcttgctggttattgcattacaaaagagtggcaggaaagtgtatttgcatgcaggacattttaaattttaatgtcaaaggtcattagtctttcccccctcccccttcttctggttatatctaggagctgggcttttacatactggggataatttataagaaagctattaaaagtaaggcttcagatttatttttcacattctcggagcccaacaggctaaatgagaaagagtctaaaataaagatcatttccatatatttgaatgttgttttgttggttgtgccactcaggtctattggggacagtggggtaccacatgggaaggatcacgggcaaaggatcattcctagcaactgccacgtacattctccctacccagaatagaatgaagatctcttatggtagcttaagaacactaccaaatgcaacatttggaatttcttcataatttcaagttgccatgtcttctttattttccttacatgaatatcttattttttcctttctagcttaggaaggagaaatttgctgggcattactttttcttttctgactcctcatgggctaagtagagaaacttttcgttttaagctgacgggagcaggaaaaatgaaaattaatatctttcattaatattagtaggatttgtggattcatatgaaaggcagtttaaagcccaacacactgctcagcaatcctactgcaggaccctactccacccacttgccctggatgactatttcccacccttttctcagatctccaatagcttctctctgctggtcctgctatgtgtatgcccttacttcctgttttactgagcaaagctcagtcaggaggaaacctccacatgctctcactagcctacctgctcctagaccatgtgctctctgaactgttctgcttccaccctcggccttcatggtgccgtgaacctcaacacatgcctacaaaaacacttggcttccgcaattatctgttctctcctgcatcatttgggttcctctccctactagacaattctgagaggatatgaagatgctgtagtgtctctaaactaaagagatgaaagaacgaaaggagagagaaaaagaacaaaggaaggaaagagagaaatggaaagaaagagaaagagataaagaaaagaaataaagagagtaagagagggagaaaagaaagaaagataaaggaaggaagaaagaaaagaagggagaaaggcaagcaggaaggaaggaaaaaaggaaagcgggaaggaaggaagggaaaagaaaaaaagaaagaagcctgcataattcattccagctcccacgtttctctgcttcccatttacagcaaagaacatcagaggagttgcctgcacatgttctctccatcccactttcatccccaccgcttctcagaatgcacttgtctgggtcatccatggccccttggttgccaaatccatttttctactcagttctattcttacttgatctatcagcagtacatgatacagttgatcacttcctccttcgtgacatacttttttttcagttggctttggggacaccacaccctcttggtttcccacttaaccacactggcctttttggtctccttgctggtcatcatcctctttctgatctgtcaatctgtaatgactcagggctccatccttaaaaacttgtctcttaatgctctcctcacttcctagaaaatctcatccactgtcaaggttaaatactgatgttttcgaaatctctatctctagcttagacctcttctttcaactctagacttcggttacacatcccatgcctactcatgttcccttggatatttaaatggcatatcaaatataaatgctacaaccctggtctaagtcaccatctttgctctagacttttgcgtaagtgttctctatttctatccttgccaccttatttgcaacacagtagccagaatgagccccttgaacctaaatcaattcctatcactgttctactcaaaaccataaaaacttattgtctcaaaatagaagccaaagttcttgaggctattcatcttgtccctgccgtctccctgattgcataggctgccaatgtcctccttacttcctctgctacagtggcactggccttctactggtactcaaaagtgccacccacacctcgtcatctcatgatttccgcccccagaacacacttgccctggacatcgccgtagcttgcttcatcttttcctttagatctctgctcagattatcaccttttaagaaaggcctactctgtcttttataaatcagcagtcctcttgctgatctcccactctctattcctgttaaccatttcttataagcacataagatatcattgagttgtttattttctgattctcccccagaatgtaagctccaagagagtaggcattttgttttggtctctgctctatgtctagttcataaaatagtgccttgcaagtagtaggcactcaataaacattgattgaataaatgaaacatggaatgagaaatgtacatctaaatttttaagcgacagctctaacaattggcctgaaatcaaatactgatgaccactaatgcttattttattttctgaatccgcacgcccatgattttggcattttacctctttggtgaatttgttgcttctcctaaaaaggtaaaagggtgtaagatttccttgataaccttttgagttatatgaactcaagctaaacagaatgttactcaaggatcacagtaactgaacgtgtcaaaatagtatcttgcttctctcttcctgtatcagtcagccccacaggaaacagatggcatccatacattgggtaatttgactagagtttaacaaaggtagcattttcaaactacaagacagagtgcagtaccttggggctagctgcagcgttttctgatgctactcaactcctgaagggtaaaggggaggaaagaggcataggagagggaaggttattgggacctgagggagagctgtgtgacaggccccttggcagaggccacctgaaggaccagcagccctgggtggtgggatacaaccaacctgtgagaaactctgcttggaggtgacagggtgctgagggactaatatcctaagttctttctcctcccttctgatctctggctggggtttcccattgaccaaactaactggaagctagagagccctgggccgtagtccatgtaagccagcctctgaggcaggcaacaggcgaggaaagggtggagggcagatccagagggtaatggcaggcatccagcaggacgtccaagtgctatcttccaaactctagactagtcttccacttctatgcgagtgtcgtgtcatccattcttcacatggcagccaaaataaaaccaccaatctgttcatgttgttcccttgttgaagactgaatcattcaacagctttctcttgtgcttacaattaattccaaacgcactctagtggtataccagacccatgaggggctggctggtttctactcacctcttccctgaagcttatactacacatgtccaccctggtcactgcaccaactcaaggggctgccacttcccaggaagagctaagttcagtgtcctcaccggctcttagcatactcttatctctctgcctgcagcaccctttcttcaaccctcgacatgcttgactcatttagacacaatcacctaaggaggcccttcctgtcctctttgcctaaaggaagttttccattcattctctatcagaaaatatttccttcacagcatttatcacaaaccataaatggcttctctttctttctctgttgccattgctttgttcaatctgaactgtaaacaaaacaaagtcagttgcttcttgttcactctctgatcttcagaattcagaacaatgtctggcccaggtggtttctcaataaatattgggtgattgagtaaaggaacattattttcaatgaaaatatcttcccatttatgcaatagtgaaaaaatagcttacttgaagtttatctccaatgtatctaaatttctatctctttagtatttgggagatctcaaatatattaataacacatacttgaataaaatatacttactaatgacagagttgattttctacagctctggctgatttttttttgctgttgtttgtttgttttgtttttgtttttctttttttgtggttggtcttgtatgcctttaacaaaaattaagctaacaaatgaacaatgccctttccccagtccatagtttcacagcagagctaattacatgcagctgactttttgggtgacttattggaagttagtgctgtgtggtcacaaggtttgtgctatacagacaaaaagacctggccaaactccagttaagccactaattggctgggtaagactgtgacaagttattcagcttttctgttccacattttcttcctctataaaagcaaggataatgcggcctaattcctagagttgttttaggatcacaggtgataacatagatcttctctttcctctgtgtctttcactttctttagtgacagacatctgctcaaatcctccttttttcctctccggctgcttcttcatcaataccgtctccccaacccattttattagtctttgaatctcatgtccatattctgagaatcttgctggaaggctttcctgtccacacttcctttataatgttgaatttgctctctggtggaagcagcctggagcttgatcatgcccatgacgaattgcagactcatcaggcttttcgtttggcatcgtatttgccagacaaatgtagacagcacttttgtgtggtgaagcactttgttagtacttcgagcttctaagggacaatgtgagttggaaaaaaaaggcattgaaaccttgtacaatactcaccccattacacaagaaaaaccaaatgagtttatctgacaaaaaggtgtgggtatgtgtttgatagaagaagcccaagccacaaggtgctctctctacagagaatcaagatgcattgaagttttttgtcttttgtttacttctttttagtgaaatttaactaatacactttgaatgcattctctgtgccaggtattttctttattcttttagatgaacttggaacggtgaaggttacaaagtaaaaatatttaggagtaagtggcttttacaagatttgaccaaagaacagaatgctttgctgacactttggaaatgtaagggtggtatatgtttaatcgggaaatactcagtttctaatgcatgcaatgtttgtctggaacctttttccttaaatgattcaaatcagttccattcaaacctgtgtacttagcactcttgataggtactgaataaaacaaagatacagtccctccttgctgggacttcagagtctggctcattgttccttaacttatttaaccaatgtctctaaatttctaaatataaatatctcaggccctctttacatgttatttgaaactttaaataagctaaattaaagataattaagttaaagccctgctttatttttgttacctataacttatacatttatttatggctctctgaaatactgatgtgactgatgatgtgaaatagcaaacacttgctgataaatggcacaagcttgtcatttatcagtcagcttcatgttttgtagaaaccagaggttgcaaattagtggttccatgggtccaatgcagatcacagagtcattgtcatcctaagtgagccaacatttgaagttgagatattatccatagaatgcagattttcgacttatcttaaaacattggaagatcgggtagctatgggcctgcattcccacctgacagcaatgggatgggactgactggctgctgcccccttcagggaggacgtgttctcttctgttgtcatgtcctcatcactcatccagtaaacacacatgcctgaaaattggcctgcagcatgcaactaactttcctgactgctggaaaacacttgagtttgagagtcctggtagattccagggagaggagattggagtattttcagaatacagagtagatggaccttgaggtattggtaggatttatatacttgaagaagtgctgagaggaggtcatgccagaaaggagaataactttgatgctgaatcccaccaggtttttctctaataatatttaaattgctgaaggatgcagatgatttccttttttctaataaatgaaagcatatttaaggttaagactcttactctcttgcaaccttgcaatctaatatactttcttgagaggaaggaaaaatggagaagttatagttagcaagagctaggaatgggtatgactaaggttccagcaatgggacactgtcaggtttatgaattctatgaattcatcagttaaaattgtgtgtgtgcctatgagtgtagaaagggtaaatgttgaaaacaactgtgttacggcagcaaagattcagatttgccacagaaaataaggctgacattaccactgagtatctcccaaaagcttctcatcatagtagttgagccagtacttttttttttttgagacagagtttcactcttctcacccaggctggagtgcagtggcgcgatcttagctcaccgcaacctctgcctcctgtgttcaagccattctcctgcttcagcctcccaaatagctgggattacaggcatgtgccaccacgcccggctaatataaaaagagtaagagatgatgagtttgaccaagatacctttaagagtatgacttctgtcaccaaagacactccatatcctgcaggatttttctaaaccagcctctactcgtatgtgagattccccctgttgatatcacgcttaagatgatatctctgaaaagccactatcaggataacattgcatcaatgagtagtatcatctttacatttaagagctggttttcatttttcaggttaactggcctttcactaacaggcagggggccgagaaagagtgcaaagtgggtaaagtttactttgttttgatattattggagaatatcaaatgaagaagttttcttatcctggtaaggccagatcccttgtatagcttgatgtttccttggtcttcagaagactacaccataaggatttatttttgttaaattgaaaacagatctcctcccaaaggaaaggcccttttattgatcctgaccttttccttttgctgggaaaggcttgttgagttgccttttaaacaaccagaaatcactgcttttttttttccttgtaatcttttatttatcctgttcacaggccttacatacttaaaaataaatttcctatggaaattgtaaagcagccctacttagtgaagagttaaggatagaaaatcgtcttaacaaatcacatgtatcatgtgtcagaggcagggcaggcagttcaatacctaattgtccctggcctcaccctcttcaattttactttcttcttttgttttcatctgtatcttgtgagttcccacaagaggtacttcagagtttattttgtctagtagtgtcatgagaaaacttaaagcactgacttgggattatattagattattagatggaagaatcaagaaattaatttccttcaagagaagaatggcatgtctggccaaacagaatattgcttaatgtaatagaactcccaaatgaaattggagagtggatcgctcccttacctgggggatgtgagattattgaattccagatttctgtataaattaacatccaaatgagtggatccgccctctgctctgccagccatttctctccctttttgtgattgttctggacatgaatgtttctgttacccgccagagggctgcacatcttcagccagctctgccagagaataaaagaattaatggattggaacctaatccataactccctaactccacagctttatttttttaatagttcataaacttcttattttcccctttagcctagatttcctttatggtgaaggaaaggtttgccagcctttggatctgctttataaaaatgctttaaaagacaatgctgtgttgtgtgaatgcctgcaactcaccttcatgcaatattcaagaactgtcccagagtttatgtctgaatttgttctgatgtaaggaaccctggagccaacaacacaactagttccagatgggttaagttttgcattcttaaagacttagtaggccaataaatattgcttctcttagggctgtcgaaagtaatgtaattgggagcacgacagatgcctaacgggatacctagagatctctattttgaaatttctaaagtgacataatacagtttgtatttttttcagaataactacattaaatgtctgtttttcagaatgaaactctctgtgggatctgttttggcatctttctcttcttctgggtgatagaattgggagataaaccagtgactgatttcttaaaaagttaagttttgagaaacatattttataggacacacatgccttacaccaagcgctccaacagcaaacactcatgattggatttggaaacagcagcatttgctgtctgaaggggaaacctacacaagtggaatgtatccagggttgtgggttcgaattgttcacaaaataaaacgcaaaaaagtagccattgttgagaacttggagaggaggtctcacttggcacccttcacatgtccttttcaatcagagagggactggccagcacctactgaccccagtcgccttccagtttccactccatggccctgctgctgcacagaagccttagtttcatgagctccctgtgaaaaatcgaatgcacaattgattctcccctttctggaatttcacgtgttatctgttgggaaataaaaaataagtgcaaaagcaaagtatgttgtgtaatttgtgtaagttcttcctgaagtatgctttctttttgaggtgacctattcattcctctccatgtgttcccccacccccagtgaaaacaaccttttatttcctgattactgatatgtgcctttgggataaactaaagaagagagtaagactcacctgaaatttgaagactatggaatactaaaactttgcaaatttcccaacaaatgtctcattatgcgtgtacgtagaaaaacacaaaattttataaacattttacataatatgtgtactcttccacctgcagctttataacctagtttttaaaaccaaatatcatcttcctatgttgataaatatacatctacatcttccacttaaaagactgcatagtattctattttataggtgtaccacaacttacttagcctatccccttttgatgggcatttagattgtttctggtttttttatattataaaaaaacaatgaataagcattctcatccatatacatttatgaatttcacaagttgtttcctttggatataatcctacgaatgaattttttttcataaaatactaccattaaagattttgagaaagttgctaccctgcctttcagagagatactgatttctacttatcccatctgtgtatgagcatctccaattccttaaaatctcaccaacagtgggtagtataaagctttctcaaccaaaaagggacaaaaatatttgttgtaatttttgtttgaatttctttgattcatagtgaggttggacattatgccatcattggcattcctatttcttcttttggaaattatctgttcctatcctttgcccatattttgctttttggattttccttattgcttgcaatggctttctgtaaatactggatatatgtgattcttatagaagcatctggaaaggatcttgtaaaaaaaatatttgagaacaatgcaacattaaagtgagaaaaataatttggtgctgtctcactctaagtatccattgaacacctctctgttcctcagtttcctcctatataaaattagaaaagagtaatcatccatttctcagatttcttcagttgtaataaagccagtagttattaaagtgaagcatttcacccatgttacttccacagtaaacactctggtgtcttctgttgttctaaccactctcgacttacctggttggtgagaaagggtcccaccctagggttagaaagatgactgaacaacactggaccagtgagacagcagtttgttagtcacatatactcacagcccagggaggaaggaccctgagtgccacacaggtccacgtgggagttgcacttgggaacacagtgagcaatcaggggatgtgggaagaaggctttagtattaagaggggtgggattatccctgtttctatgggaggatgaagtcggcttgtctgaataattctgcaggctggcaggaaactgaaatccactactccggaataagaggaataagcaggaaccatgcctggttcacatgacagggagggttgtttggctgggggactttatttgcaggagcagagctgggaggtgtattagtctgttttcacactgctgataaagatatatcggagactgggtgatttacaaaagaaagaggtttattggacttactgttccacatggctggagagacctcatgatcatggctaaaggcaaggaggagcaagtcacatcttacatggagggcagcaggcaaagagagaccttgtgcagggaaactcccattttaaaaaccatcagatcttgtgagactgattcatgatcatgtgaacagtgcaggaaagacttgctcccataattcaatcacctcctgctgggttcctcccacaacatgtgggaattgtgggagttacaattcaagataagatttgggtggaggcacagccaaaccatgtcaggaggggaacttgtcattaggtcatttgaggccctcctgaatttctccatatgtcaaagcagcacaaaatatgggggccttgattttagaccttatactgcaactatttctgagaggtgagtcctctcagaggactcagaattcagtggcctcttctcggtccccattgcctttgactacgttcatcctatgcactcctgaaaactcttcctccattgccctccatcccacagtcctgtccatgaaggcatgagtcagatggtccctgagtgaggcaacatgcctttgatcccatctctgttgtctactagttatatggctttgacaagatacattactctcagccttggttttaatgaaatagaggtagtgcctacgtcataaaatgacatagaaaaagttcccagtttagtgtcagacttatactgggcactttaatcttaattctttgtatctttcacttgttaatgtcacatgcagaccatctaaatttgagtattaactaagatttgttgcttaccttctagtcttctttctctattccttaatccttggagatatacccacatttactatggcttcaagttatggctttaggcaaatgactcccaagttgcatttcctgcactgatcactttctggttttctggttccacgtttccaattgtctcctagagatttttcctgctgtgtcttattcagcatgtttaaaatttcccccttcaaactagtactttctcctgactggcttccttatttgtgttagtggtgacaatgatctctctgtcatcttggcttaatgcttttaagtcaccattagttccttctctttcagacgcacaataactcagctgttaggggctgttggtgtcttctctcacagtagggcttgaatccaccctttccctccatcccagacatcagtgcctttggagctggagagttgtgctaggctcctaggtggtaatgtcgggtacccactcagaagcccagagttggtctgaagattattttaagctgaagacatttgggattcaacagatgcggaaaaaaaccgtctcagagcttctcttatttgactaatagcagaaacttctgggaaatgaggctttcataaattccttcttcagggtggcctttactcctaggaaggagactcaatatatcataaatatcctctctgggggagttttatagccttgaagaagacagagagaccactcgtacctggatgaacaaacattattacaaactttcttatctctcattgtttttcctgtagaaacctgcttattctttccaaagaggtcttttctcccactcctttttccctactaaggtagttatacatttgcccctccatatctgaggttcaattaacagtggatcaaaactatttgaaaaaaagaaaattgcatctgtgctgaacatgtatagacttttttctcttgtcattattgcttaaacaatacaatgtaataattatgtagcacttagattgtattaggtgttataagtaatctagatatgatttttgttgttgttgttttgagatggagttcactctgttgcccaggctggagtccagtggctcaatctaggctcactgcaacctctgcctctcgggttcaagcatttctcctgcctcagcctcccaagtagctaggattacaggcgtgtgccaccacacctggctaatttttgtgtttttagtagagatgtgctttccctgtgttggccaggctggtcttgaactcctgacctcaagtgatccgcccacctcggcctcccaaagtgctgggattacaggtgtgagacaccgcacttggcctagatatgatttaaattatacgggaggatgtgtacaggttatatttgctattttatataaggaatgtgaacctggattctggtatccgatggagggcgagagagggtcctggaaccaattccccatggatacccaggcaagactgtataagcctctaactttaaccatttattgagttacttcttttgtaagcttccatatgcacataaataaacttttctcctgttaatctgtggtttgtcagtttaatttgcaggcccccaaatacctaacataagaagataaaggaaaagtttttttgtccccaacagaattaccttgcctgcaaacttccttcttatctttccagttcatcctatctcccactctctaataaggctttcagagtttcagctctgatcacattttctctactccaaagcttctaatggctcctcagcacccaagttcctcagcatgacactcaaggcccccagcagtctagtcacagcttacttgctaggatcagcatccttagcattcctataatagattatatcaagttgatttgtttttaatccccaggacatacattacactgagatgcacttgcacatttttttctgtttctgtttttactctacctgggatacccacctttccattctcagtgttttgaaatcttagattcatcattcaaatcctggcattgctgattatataaccttgaaaaatcacttacctctctgaaccttgggttccacatttgttaatggggataatattatcaagttacagggttgttgttgaaaacaactaacacaggacttgtgtcatgaacacacattgaattgtcgttgattctgttgctcctgtcaccccagctaaaagtaatctttgccttctctaaatacctgctttgttgcttataacagatttatttaattttttattttctttcatattgccctgtgctgtgttatgtttcaaaatgttctatctttactaactacactgaaagtgccttggagttgggtatcaagtattgtatttttttatttattcagcaaaaatttattgggcattttgtgtttcatggtgtgctaggggctggggatacaaacatgataaagtcttagcctctgccatcagaaagcttgcacactatctaattatgattgaatgctacctagactactgttgagataagctcagtgagagccctgagaagggatacctgactcagctcagaattcaggatggcatcctgaggaagttatgtctaaacagatccgaggaatggcaggaattagacaattccaggcagagaggagcagtgctgctagatgaaggaggaagggcattcagtgcagagagaatactcacatacacagaggggaagtagagcatttttttttttttttgtgaattccaagaaccacagaactgtgatcttagttttaaaggagaattcacaggagataaaaccagtaaggtaaactaaggctgaatcatgaagggtttttcagttctttctactgttaatcatgcctggttacagtacctacatctggtaggttcaataaatgcatgtctagcttttataaatagtgaatgtacatggttcagtcttggagcattacagtcaaggaaactccatttggcaagagaatgaagtttcacaatagctgaactcttttacttgtatttcttatatactaaaacggagagccatatatctaattcaagccacgtttattaacaaacaaacatacaaacaaccctcagcccctacccagtggcatatcttcacactgatgtctctttcttataccctacaagtaaaacagaaacagaaaacattttatctcctccaccagctgacaccttctggcccctccttgtgctttcctcacattccctccatacccttgctccatccctcccttcttactctctcttcctttttccatttccacaaaagtccagtgtgactgattggcagacactgagcttttctcaggtgactgtaggttaataatgatcgtccgaacccatgtaaggaatgaatgaagcattgtgtggcggaaccaaaggccgctgctgtcgctcctgaagccctgtgtgtggtaattgggtctacctcagaaactcatcctttcattttcaaaataaatgtgttcatccagtgttacgtttcccaccccacctccttcaattatctctcccaaatcttgaatcataaacttctggaaagccatgtgaataatttagatgcttttatgactcattgcttaactccctttgggggaaatgaagagaaacctttgtcttttgctgcttactctcctgtggaccgagaccatgtcagcttcaagcgataacaaagattgatgaccacaggagctgtcactgtggaacagttgattgacccagagttttgattaaccaaaatattgttttaaaaaatcaggtgcagtgctaatgacactagagtagaaattcaacattttacccactttgactgaaaacttgcttgttatcatctttcttgtcaatgctgaatggtgagcattttcttccctgcctatttaatgggtttcctgtggagtcttatgcagaatttgtcaattcaagtataaagctatgatcactcagagtacgtggtggtaccttgctgctggggatgagggagtacagatgcgttcagatcctttttagtttggtctttctaaatgtttttactcagcttcacagaatcaggaattacagttagtaccactcttgggccattggatgactctggtatattgggttggtaccagagtaactattgttagaatatgtcaatgtggctacatcacctctagcgccataccatccaagtccaaattaccatcccctcctagacacctgtgacctaggaggtctagactacttggtctacctggatctacctggatctactctgtgtccccccaaaatgccaactctaatctatattttttcaaagcgtaaatctgatcacatcaactaccaccattataccctgcttaaacatctttaaatagctttatgttgctggaaatctttgaagtgctccacaaggccttgcacggtccctaccaactctccatcttcatcactctattccttgcattctccacaccaatctcactggtctttattcagtccttatgtttactgctcagcctcacggcaaggcctttgagtgtttgattcccgctgcctatgatgcttttcccctggctttaaatgtcagctcaagtactgtttcttctgagacaaattatctgccaccccatatctagacgaactctttgtaatagagcctcctagtaccaaaatacttcttatacacctttcagagggtcagttttatatttgtgagatcttttgattagtagcttccttttctctggacttgcttttttccccctttttgtggagaatggggtcttcctatattgccctggcaggtctcaaactcctgggctcatgctatcctcccgcctctgcctccctaaaagctgggattacaggtgtgagccactgcacccagcccctctggacttctaaggacagggactatggttgttttgactcaccttgatatccccgtcactcagcacaatgcttggtgcttaaaaggtacctaataaatatggattacatgattggccaaataaataaattcaatacaagtttaatcagaagatgggccttaccttgtcattgagggatttatctagttaagaattccagatgaatctctatcagaacagccaacagagaaaatgtattcagatgcaggaaggctagaaggcagcctgtagcagcaactacacccatttcactctgtattgggtcaggcaagacttcattaacaactgttcaaaatgcaggacaccattgatggtaatggttttggttagatgtggggacaatctctctgggactgcaggaaggttgttctactgttacagggctcacaactataaagtgtaaattattctctcctgtttctctgtttttgagggacttgtcatggatcccctattagaacaaagttgtggacacttagcaagttgtgtataaatgagctttcgttgttttcactgatccatcccaattagttcccctacttgtctgcatgctatctgcctaaggaaatgtgaaatatcttatttgcaaggagagatggaattcttgtgcatataggtttttttcttttcttttctttctgtttttttttttttttttggtttttttttttttttacattacttccaatttgcaaaggagagaagtaaacagtttgcatagggaaaacgcgtttttcgtcagtagcctgctgtggacggcaagagagaggagctttaccaggcattgaaatagtagcttttgtggtctcaggtcagagcatcgctctgtgtctctaggcagatttggtttaaggccaaaacaaatagccccccttccttgggttctgacccctgggggcagaaaagggaactaagctagtccagctgccactgcaggggaagtcattgttctctccaaccttctgggagctccaaataattaactgtgcaaagagcaagttggaatcagaattctcctccagggttttctgtgtccagccaaacagagcgagctgagctgagagacaaaaaaaccccgtgaaagagaaccagcgctgagtctcctttctccttccttgcttcagttctggtcccctggacctgtgtcctcagctacctcatctctcttaattcctccaggcccctcatcatgtgtagccagagggagatttttcttaatgagaagagccagcaggccactctccagtggaaggttggtgctttgggacttagaaggcttggcatgtggacagaaatctcccttactctcagaatttctgatgttttcaaagagaagccagaaatctggactgtggtgtgaagtcatccaagtttaaaatgtttgctctatgttttgtgtttatacacaaggtgcaggccaaacaaaacacatttttcctacctctgaactagaccataagcttcctggaggtgcagattgtgttgatcttgtttgctctggtattacccaggacctagcacagtacctgctgcataatagcagttcaacatctattgacctgcatccctaggagactcactatgctgtcattcccttgatattaatgacaataaagtacaacaataattagatcaatgactttttactgagcacatgttaagtgctttatatataatttgatctgcattatgaccttagaagctgtgtattctcactttgcaaatagagaaagcagctcagagcctaaaaatgtgacctcagccagttgcccagctgcagtgtagattctgattcaagcagcactgtgtccgaagccagggtttgcaatcctaatgccacagtgcctcccgctctgttctgctgattcccgccagagggagcaagggtgaactctcctagcgttagctcttccaaaagggagaaccaagcctgggtgttgtcaacttgccttcagggcagacctttgaaaggatgaatatggtcagtaggtattattttccttctgcatagcattgaaaaacgttcctacttttccatctccatctctttatgaggaactactctgcaggggacttcgattagttgtgattgtcatggtatactgtcatttgatatccttaagcgctacagaacagtccatatttaggcatcttctgaggactcaggggcagtctgagctgaggttcacagagtcattgtttggtgtccttaactaaatgcaaaagtggtgactcattaccaacttaggatacaatcaaacgcatgggttcctaaaagcagaatgctggttgtagcctgctggtcatgaaatacatttttttcttgtggtgcaaatactttattacaggtagtgaagtgttagaacattattctatgagagacacaaaagcctaattttacaaagtggggtagctaccatttgatgggcttatatttgttaatggtctcagctattgggagagacttttaatcaggagaaatggacagtaggaatgaagaatatagaccttcagaaaaactgaacatgctcttcccctgctttctatgtgggcaatgtctcaatgtctcttttgatttttccaggctatcatcctggtgtgaagcccatttactctttcactaaatttttctctgatagaggaaggttttgcaagctggactattggaagtgaaaagtagctttttaaggacattcgttgtaattagcatcataatttcacttactgaggcatcatttaagaattttgcactcattccctcatgtggtcctttctaagaccttgtgacactcccctacttccccgctattttacagatgaggaaacaagctcagagtgccccaaatcacacagctgataagtagcaatgtctgactattgtttcaagtacggttcatgcatcagaatatcctgggaaacttctagacattaagtaaagcttcctgagttgcaaccttctgacctgctgtcttaattggaggggagcctgggaatctatttttcaaaagtcccccaggtcactgtgatgtacagtcagacttggaaaacattgccatatattataccatacattataccacactgaaataaatcaaagtacagattcagtttggaaatttcaatggttgctttttctggtccaacacagccatccccacttgtgcctgagggctacagaaagtgcttttcaaaggaggtacattttgctagatcctaatgaatggataagaaggagaaggagaaagggcatttcaggcaaagtgaccacaggcaaaagtcacagagtcgaaactggacttgaagtgcctggggggaatgttacaaagtcaatatgcctgggcagatagtgacagatgtaaagtgtgtattatcagttgagtccgagtggagtctgtcttgggatgtcccagcagaattggcttcagctgtggagcacaaaacacctttctcattggtcagttttcttgacagcctgcttcagggcatccttacctgcatgcttctgccagaccacttgctgaagatgatcaggcaacgtgctgacagctcagatagggttcctgtctacaaactccttaaactcgattgcaatagggtcagatccactgtcaaaaatgatagtggatgagaaataacttggcacaacacagtaggtgctgaaacagaggtttgaggtgaaattaggaactctttagctattttgaggagctggctagaaatcagaaggttttcctcccaccccagaatgctcttgcaaaaacaggtggattcttgaagggaggaggtttgttcattctctgttaaaaagtacgtgactttgatagtttagacccagcaacttgtcttttcccattaattctaggctaccaaaatatatatgtccctggactttttttctgggttaatattgattagaggagtagagtgaatgcttctgtgatggtaagatgggaaggccacagagccaggaaccatttgcctcaaaacaaaaaacaaaacaaaacaaaaacccacttagaatgttactcctaggagttggttcatggtgactaaactcatcaacataaccccaagtggcccaaatggccattttaagcactacctctattcagtttccagggtacctgagtttgaattgcctttagtctcatttacaaaagctttgtcctcatttccttagaaggtattttgctgggtaaggactggtttaagagaacaaccctggtggagggaggaatgggaaatttcaactggggaaaataaaagatgttctagagatggatgatggtaatggttgcaaaataatatgaatgtacctaatgccactgaactgtagacttaaagatgattgaaatggcacattttatattacatgtattttactacaataaaaaagatcataataaaatggagaggcagcaatatcaatataacaatgctaacagctattgttcttacaatttttgctttgtgggaggcattgtgttcagcactttacataagttatttaacccttttaacaaatccgtgaggtaggtacattgattatctccttttcatagagaaggatttgaggattgaaggggttaatgaattgccaggggtcacgtaacaagcaaatggcagaatctagatttaaaaccaggcagtttcattccagagctctctcttttggcttatgctcttaggctaaaccacctcataagattgtcctttgagtctgagactccctgcacccagcaataaacaactgcagcaaacatctaaaatgagtcaaaattaccaaaaattcaccttatcaaatgtcagcaactttgatacatgtagtattcttttaatagcaaagagatatgctctgattcttgcctgtctttacagttcacctctctaatcagatagaaggatattctattatttattggaaagatggttacctgaacatttctcttttctttgatgtgaagttgtaaaatgccactttccacttaaacttgtgagcttctcaggagcaggaacagtatctttctacatggcagataataggtgctcagtaaaatttttgtcttgatgaatttccagtgataatgaaggtatctatgtaagttttcctaataattagggggcactatctgggtgtatggctcattaatttagatcctggaatgtacattctgaaggataaattagagattctcaactgggaataattttggctcttgagagacatatggcaatgtctggagactttttggttgttataattgagggagtatgtgtgctactaccatcttgtaggtagaggccagggatgaacatcctgcaatgcacaggacagcctccccagtaaagaatcatcccacctcaaatgtcaatagtgttgatgaaacagaagagttccctggccccactcatggggcatgcgacaggggtgcggctctctgttcaaccaccatgaactcaaaccccttgtgggagagggagcacacagatggccaggtgcaggagcaagagtgagtgctttgggctccagtcccatggtagtgtctaggggtgggtgcctgtggccccagtgttacaatgctcttttagctctgccattcacagatagcttaagtgttaaccagctcagtgctccctctgcctttctgcaagggcagagggccagtgtgacagctttctgtatcccaagctcttgtccagcatcctagaagaattgggtcacacacaggcttgaaggatgcatgcaggggttttattcagtggtggaggtggctctcaatgggatggatggggagctggctgggggatggaatgggaagatgatcttcccctggagttttggctgttcagcggccaaactcttctccgactgcccccagctgagttcctctcggcgttcagacattccttctcctctctctttctctgttgtgtcatttgtctgcttttctcctcttctccttgtctgctcctggagcctggggtccgggatttatatgggtacaggataagggagtgtggcatgccaaaaggcaaccgtttgggtacaaaaacagaaatgccccacttaggggccgcaggtctccaggcttgaggttggggcctttgccagggaacctccctcttctacccagtatttccttgtcttctgtctgtatcactggggagagaaattctgcttcagaggtcttattctctcattcattcatttcacatgtgtttattatctgcatccacttggtcagatgagcaagactgcttgtccgtgaccacacagctaggtggtacagatcgagaacttgaaccaatgtctcagggatagctcttcttcaaatgcatcaaggtggcctctgacagcctattactgattcaaatgccatccttgcggtcacggtaaagcaggtccttctgagacagataggactctgagcctgtgcttggtacctggagctgatggaaagggcagtgatctaagacggcttgtttaggctgcagaaagtccctcggcttggactctctgagctcttgctcattctgctgaggcagggaccattttggggcctcctgtgtatgctacattccattgctgggccagttactcttcactgaactgtaatactatctcatccaccttgttttcacagggccctataagccatattatggactttgctgaaagaattatcatgttcgcacagctctgtgtttgcagtaggcttaggactcttttcagatttgagcactagcggtctttcatgcgatctgcttttcaacacacatcacatgttctcctcctccctttcctctcccggtcggattccttgctgccttctgattatggtctgcctcagtatgcagagtcccacagccgagcttaacaggtactctacaattctcaaggtgctagagttgatggattttaatcaggtgagtgcagtttaatgcaaatgctcctttagccgaggttcataaaatgggctgcttaatattatggtcccaaatattagttcaatgctcatgacttatgtaaatggccttgctttggggttaggttaggggaaaatcaataaaaaccagctggaaatggagaaagcaactgtgtacttacattccattgtgatgtaaccctgctcccaccccacaatacctcgtacttatcctttttgtttttttgccagctcacttttctcccccacatttaaggtttcacagagatatgaaaagccaccctggttcctccatctattaaatgggaaatgcatatgaacaaatagaagaattgcaccatacgatgcagctgaaatacaatgttatcatccttccactctgaacatttctcaggatggtttatgtcccagcagttaatggcttgctattgttggtgtaccaacacaatgctattagcaacacagaattctcaggctttctgtttagactatcttcatgtaggctagccagaatttagatatttgtaaacggaatttgaacagtggcctttcttcacaatataaaattcagataagtgtaactggtcatggcccaactcttgtttattaattaaggctttataatatggcaccatttttggaagctgcagtttatgcaaagaagaatactaattacattctgcattttctgtaataatggggcagtgttttggacaatgcagtttatccagacaatgcatccggctcataatgtagtttattaacaaggaggctctgaatgtttcatgggagattgatacagctgtgaaagggtggcataaataatattcctggccaggctgggggcagtggcaatatgttgcatgctgttaacctcaagagatctccgaatagcttttatgtatgcctgctatatatttgttgaccattgctggatacaaaggaagctaagtgatctgggaaaatctatttggtaattttcttttcccattctcttagcacttgctgaggccttaaaaacaataggcctttgcatttgtatggattgtttttccttaggctccaacaagaacgtcactttaatattgttatcatcatggatttcttataatggtcatttgtgagaatcagaataggctaccattttttttctataagatatttttcttattgaaataattcacatagcacaatgtttatccgtttataatgtgaaacttggtggttttagtataaatacaaagttgagtagccattaccactatctaattctagaacattttcatcactctgaaaagaaacccctagccattaacagtcactgtccttcctctcctcctatgtcctggtgactgccaatctacttgctatctctgtgaatttacctattctggacatttcacataaatggaatcatatgatatgtggtctttgtgactagcttttctcacatagcataatgttttcaaggctcatccatgttgtgagatgtaacagaacttcatttctttttattgccaaataatgcccattgtgtggatatgacacattttgtttatccattcattagtaaatggaaatttaaggttttttttcccacattttggctgttaagaataatgtggttatggactttttaatttgtatgtgtgtgtgtacttgtatatttatttcctcagaggtatatacctaggagtagacttgctgggtcacacggtaactctatgtttaactttttaaggaactgccagatgctttttgaagcaccattttataatcccacttgccaatatgagacttcaaatttctccacagcctagaaaacacttgttattgtctatctttttgatcatagccattctagtgagtgtgaagtggtatcattgtagagctgatttgcatttccttcttgactaatgatgttcaacatttttttcatgtgattataggccatttgtatttcttctttgtgagctaccattttaatctccattttagaaatgaggaaacaatggcactgagaggaaacaagatttattagggtacctgcatgaggtaatagcccatcagtattggaatttaagttctctcacttagctatgcaaaagcatagacattgagtacctagtaataaaataagctataagtgatttgcatttagtcttaacttctttatttacaaatgacagaaacctagctctaactgtggcttaatgaaagtaagaagattttggcttgcctatctataaagttaagagctttttgcctccagaatgattggatgcagcttctcaaagatggcatcagaaatatgtctctatcatctcttagttttctttccattgggttggtctcacgcataggcatggtctcactttgtagtggttagatggccgctagacgctcaaagtttttatcttaccagctcagaatgccagcaagattttttttaaattcttccctttcacaatagttccttcagtagttctcaaatcttagcattgagtagtactggactgacttgaattaatgattggctccctgaatcattcatcggtgaaatacattgattggtcatttgctcattctcagtggggagtgaagttagctccatctacaccatctggagtcagaactggagaaggggattccccagaggaaagtgaggatgatggtaccagcacaatgaggaatgcatgctagcacaagtgaaactcatagatgtccattgtgctatgcagttttttccttgggccttgatcatttatcatttactggtttcctgtctgtaaatttagaaaagatacaggctctctgaaaagtaatttctggtctcttacaagtgaagggttaatcaaccaatccacataattttctccagtactgagagatcatttgttttaataaatgcaaataaggtttcttatagttaaaggtaattggcttttcattgtaattcttgatgctggtcattttgtgtctgagttgttcctaattgctttggttcagagtctgagaaatgaaatagccccttgactataactgtaactacaattataacaatttatttatttaaatcagcaatccctgcaaagtcatttacagtttgtttatttcagtatgttttacaaggtgcaacaaaagcagcctcatcacatagcaaatctttcttacaggattaaaagttaatgggtaaggtaagtctggcataggcattaaagtggaagcattgtttcttcttgactggtcaactttagagacaacttttcccattcgaagttatctatcctctaaaatatacagagattgaggccaggtgggatggctcacccctgtaatcccaggactttgggaggccaagatgagtggattgcttgagctcagaagtttgagaccttggtaacatggcgggatgccggtggtgccatgcctgtggtcccagcttcttgggggctgaggtgggaggaccttctgagcctgggtggcaaaggttgcagtaagctgtgttggtatcactgcactccagcctgcactcctgcacaaagcaagaccctgtctcaaaacaataaataaattaaaatatagagagactgagatgcagcagcagttgtatgttgttctctggcttttgaataataaattgtatgtgtaccttcatatgataggatcttcagctctcatgccaactctatttcttaatagaaataaacaagatggacacgatacatctaggataccatgttaaaatggtttctaagactgcattcagccttagaagaaaagaacgttgtgatcacttaatgatgtctgtcacaggcccaggagagtgaaacaatggcgcttgcattgtatattttccatccctgcttacatcttgaaaggaagtcccaatgctgaaagtttgtaggattgggacagttgctttgatacttcagaccaacagacggattcttctttcattattcagataaagtgttttatgttgcctgtccacctaagtgttttaatcctcaagattaccttaactatggagacttgacttagacttaatattttgatccagaaatgcatcaagtatagaataaaaacttctatcctagcaagactaggaatacaaaatatttactcacagtatacatgtactgtctgctgggtgtgcaacattctgctaagggaatgtgaatgtggcaggagaccaagggtcctcggcattagaaatctatagtccaggtgtaattagagaaagataaagggctcaccaatggaccacagagcatacatactaaaggctaaaagagtaaaacagtttggtaatgaggaatgaaggatagagtgatctagggaaaattatatggagaaatagtttcttcagcaacatctgaaaggaagtgatgggcatcggttggtggaaaggatggttggttgaggtgggtgtagtggtgaaaaagactgaaagctactgaccaaggaatgacataacccagaggtctcgatctgtcagctcactggcctaaaaacaaaacaaaacaaaacaaaacaaaaaccacacaaataaaaaaccagatgtgtgctacacaggaatatagaaataaaatatattggaacaataaaagatttcaagcaaaaattagaaaatactagaaaatctggaagtttcacataaaatgcaggttttcttacttttctgtaataactgaaagatctgacaacattctgcctgaattcctagttggcaagaaatggctgagagggagtagcgattgccatgatacacgagtggtttgtcgcagtcttcacctctccctgcagtctcccaacactgaagtcaaaggttaattgctctctagcatcatgcttgcactgttgagactattcataaaaacttgtccagcaaagtttgaaagatgaaaaatacattttcagaagtctttgttaaaaaaagatgggggtgagataggatggggaaatagtgcatttcatatgcaatcaggccaggcgtggtggctcacgcctgtaatcccagcactttgggatgccgaggtgggccgatcacctgaggtcaggagtttgagacctggccaacatggcaaaaccccgcctctactaaaaatacaaaagaaattagccaggtgtggtagctcgcatctgtagtcccagctactccggagactgaggcaggagaatcacttgaacccggaaggtggagattgcagtgagccgagattgtgccgctgcactccagcctgggtgacagagcgagactttgtcaaaaaaaaaaaaaaaaaaaaaagcagtctttgcagacgctgccactgccgggagcaccctactatcagccatggtcaaccccaccgtgtacttccacattgccattgacacggagcccttgggccgcgtctccttcgagctgtttgcagacgaggttccaaagacagcagaaaactttcgtgctctgagcgctggaaagaaaggatttgggtgtgagggttcctgctttcacagaattattacagggtttatatgtcagggtggtgacttcacatgccatatggcactggtggcaagtccatctacaggtagaaatttgatgaggagaacttcatcctgaagcatagaggtactggcatcttgcccatggcaaatgctggacccaacacaaatggttcccagtttttcatgtgccctgccaagactcagtggttggatggcaagcatgtggtctttggcatggtgaaggcatgaatatcgtggaggccatggaacactttgggtccaggaatgataaggccagcaagaagatcaccattgctgactgtggacagctctactaagtttgacttgtgttttctcttaaccaccagaccattccttctgtagctcaggagactacccctccaccccatttgctcgcagtatcctagaatctttgtattgtcgctgcaattccctttgggttccatgttttccttgttccctagctggattgcagagttaagtttatgattatgaaataaaaattaaataacaacaaaaaaatgcaatcaagtgtaattgttacagtaggtagctagtcagctagtcagatatgagttggggcagtaaagggacaccccacatcccaccaggaatgtcaggcgaccatcaggtgatggtcaggcagttgttaagatggttctctcaaataataattggttgcagctggcaccagggaacaatagtctcccaacagacagaagaaacctaaaaccggtgatcagcagcttcctaataagatctcaggaggtgggtgcgtgggatcaagtatgtgcactaagaggcaaaatggtggagtttaactggtgtatgaccttatagggacgcttgataggtaagggaagcatgcctcaagtgggtatgcataccactgcagtaaacacactgtgcatgcaggccacccagcacgtgaacagcccactccatgggaagactcaggggagaagggaggcaagaccctggaagtatgccaatatatgaaaccccaagtcaaaaggtcaaaccatgcactcgatctctcaagtcactcacttggccctcctccaagtgtactttacttcctttcattccagctctaaagctttctaataaactttcactcctgctctaaaacttgctttggtgtctccttctgccttatgccccttggttgaactctttcttctgaagaggtaagaactgaggttgctgcagacccatacggattcactgctggtaacattctttgatgacgcatgactcagatatgttcggccagtaacgtactgctgtcttatttttattttttatttttatttatttatttatttttgagacagagtctcgctctatcacccaggctggagtgtagtggcgagaccctggctcactgcaaccttcgcctgccaagttcaagcaattctcctgcctcagcctcgcaagtagctgggattacgggcgcgtgccaccacgctgggctaatttttttttttttttttttttgtatttttattagagactgggtttcactgtgttagcctggatggtctctatctcctgacctcgtgatccacctgcctcagcctcccaaagtgctaggattacaggcgtgagccactgcacttggcctgtcttatttttcttaacactagacttctctgttcatttatttacagtacctcccagcacaaaaggcatttgagtttgcgtttttcctaggattagcaaaaagtgccaggtaggcgaaggcagtagggtggtgatggcggcagtggctctggaggccgcagtgcgagtcctggcctctgctccagccccactgtggtgacgctcgctgagctgctgttgctccagaacactctcctgaccatggtcttgggctatttcatcagcatccacgcacatgctgaagaatgcttaagtgagtcacctcaggcaccaagatgggcctcatcttcgaaggtggcttcctgggcatcaacgtggagattacaggacctaagaataaaaggatttataaaggagacaaagaatccagtgggaaatacacattttctgctcacatggatggaacaaatacattttgttttagtgaccgagtgtccaccatgactccaaagatagtgatattcaccattgatattggggaggctacaaaaggagaagacatggaaacagaagctcaccagaacaaactagaagaaatgatcagtgagctggctgtggccatgacagctgtacagcacaaagaggaatacacgaaaatctgggagaggatacacagagccattagtgacaacacaaacagcccagtggtccttcggtgcttctttgaagctcttgttctaattgccatgacattgggacacatctactacctgaagagattttttgaagtccagagggttgtttcaaaagcctcttcctgatgattccaaactcatagtttactgtttaccaaacaccttggtgataacgtcataggccattaatttctatgttttaattttctgaactatacagtcacagcttatgtttctttgtgattaatagaaattggaagaaaacacctttttaggaaagtcatagtgaaaatttgacaattgattggcataatttcctaattaaatgctgcctccattatataggtccttccagaaattaaacactggaattgaaatataggaatatatatatatatatttttaaaatcttcttttccttttgttttgataataaaatgcagttagttcaggaaatcagcacaaagcctgatagtactttactgaaatgactgcattctgtgtattccctcattctgtggtttaagctattaaggattcattttgttgagtccttatgagaaacaatagtatgaatcctgacattttctatgcatgctcatggcagagctctctggcttgggtgtatgctgccaggctgggcacttttatactttgttttcaagttttgcttttaaaggtaagacttgccccagcacctattttcccccatacattttacattgaaccttaggactcagtcacctccacttaaaattgatgacacaagccgcatacaaccattttttgtctttattttttgcgtaactttctaaggagtctctgttaaagccagttctgtggttgtcccagtgaatggtggctcttttcatttccacactggcgcatccactttctccactcttggaatgtaggaagtatgcattcatgtaattggaaaaatctggatttctgaagccagaaggttaaagcctgttaaacttcattgcagtgatatacagccgctattttatttttgatccgtggccttcgggccactgtttaaccagggcactgaacatcagtgtcagcactagggtttttgtttttgtttctcttgggtctttcttttttggcatatgtgaattttgttttgtgtaaaacgaaatgactttctcttgctctctgataatgagtttaaaattaaaggagcatctggttttgatgtggggatgatccaggattatgttgtgactgatgtatattagttatttgtacatttctggagatctttgcaaggggaaaactacaagtaatgagttttatataagtaatttaaatttgttacaggttttcaggtttaggataagcaaccttgggtgagaacacctatgacactttgttgatgaggtgattgtttcaccttaggacaactgttgcatgccaattgtgtgtgtgtgtgtgtgtgtgtgtgtgtatgtgtgtgtgaaaacacttcaaaattgatttaaaagatgtaaattttaaattggtcaagtatctaatatgccccagatttagtaaataaacaataaacaattttttttaaaaaaacgacgcaaaacaaaataaaacaaaaacaaacaaactgcgaggtagaatttaatgggaagagcaaagagggtagtagaaaatttcaatctggctggaatacaaacgtctgtttttatctcattttacctgcaaaaacttgaaggaaaggcttaaatggtaaactgaagaatttagttttgacctgtctgaaagggtgggtattgagggtcagaagtattgttaacagaaagattaatgagcattaaaagaaaggagttaatgtggatctgccagaaatgaagtaaccagactagttttccttttgacagggttattggagtagaagataaagttgagtttgagaaatagtgtatttcagcaatgtgtatgtatctcatggtatttttgtggtcaacactgagaaatgtgacatagttgatagcacaaccacgaatttagagctggtagaagaatttttacattatgtcctgcattttaaagttttgccacaatgtttaagctctgttatgaaaatcaaaataggcattttccttcctatttggttatggacatactatgctccttttattttatttatttatttttgagacggagtctcgccctgtcgcccaggctggagtgcggtggcgtgatctcggctcactgcaagctctgcctcccgggttcacgccattctcctgcctcagcctcccgattagctgggaccgcaggcacccgccaccatgcccagctaattttttgtattttttagtagagatggggtttcaccatgttagccaggatggtctctatctcctgaccttgtgatccgcccgcctcggcctccgaaagtgctgggatcacaggcgtgagccacagtgcccagcctatgctccttttaaattactgttcaatgaagcaaatgattttatccaagttttaattgataaaatacatttggataatattttagtaataggacaaatgctctttgatcttttggatgaactttactttatagagtcacatagtaagttatctttgctttcctataatggggctcctgcgtcattaacattgtatactgatatagttttctgaccatacaaactctaccacagcatcacagtggagtcactatctgcttctattgctgttagctggattagtcttatcataattatgtctttgccatagctgctctggcttccctatctctttcttgtttatctcagttaaaatatataaaagtgtattaacatttcgatacactgaattctctggagcgttgtgccctatattaaattttagtttcctaactatagagaaagagtggagggacttggaacatttctgatactgagcttttattatattgtgagcttttattacattctgagctttaaggatccgtctttctcggtatgggtagaagtgggcaaactgaaagggaaattgttttctgcattctctataatggtttttatttaagaatgataaagcaatactcactaagcccagatcagttccacaacagacagtactgaaaatcccagtggaaatgcagtgatgtttctgtattgggaggaaataaacttcaaaatgttatttggtgtataaagttattataaatatattgaagacagcattgcctagtgtaaaaagactcaacttggagttaggttagccatgcttaacccttatgtgtctatttgcttctattctgaaaccatatagagacactattaggaggacaaacatagactacagggttcaaggtctcactctacctcttaagcaggtcaattagcactttacacatccttttcctcttatataaaatgggaataataatagtacttacttcatatgccttggtttaaataaattagttgtcatcttttaggtacctagagagctatataatgtaagactcaatacatgtcagctattattattgtatttatcattaaggacacagctagtatagggaaagagaattaaacttgactgacttttctgccataaagttatttgaatttgggaacatcaactgcttatctcgtctacattttctccactgaaaactgaccagactcagcccactacccatctgggaaaacactcccaagatcaagttgctctatagttttagtcttttcaaagttattttttacttgaattttgccctatagacaaacacacgaagggtagttttgaaaattgatgccatctattatattattgtttaatgattcctaattttcagattggaagtaattgacttcatatctcgatttctaatctggttctaattgacttattccatcaatcatctagtcactaatacaatttttggagtgttgacaaaaccctttcagcgatcaaataaatcttgattgatatcttgagtgataagatttcctaccctttgttgagttagaaggggagaccaatcctttgttgtcagcaacttgatcagaactgggaatgtcatctaccagtgctagattttggcttgtttatttttgtatattttgcatacgtgcttagctactgtttgttagaatttgctatccgacattacttgacctccactttccagtgccattccttccctcaatttttttaaatcggttttcctgcttgttctatgacctaaggaaaatttttttacatcagtaagccttaatatcatcatctgtaaaatgaagataatgattctacctatctcgtggtgttggcaggaagatcatgtaagttaaagcatgtgtagtgcttaaaagttaatgaatgttaaatgcaagtgtagtgtctggcacatactaagtacaaaatatctgctagttactattattattagcagcagtagcaccagtggtaataatggtggtactgcttcctgatatagcaaaatactgagcatattctgaaaatagaaaaaaagaacaccaattgcaaaagtttttataaaggctttcaggcagtttgtcacatacataggttctgtgttttggtacctgttaccttaatttgtatagacaaaaattacctgaaactatgtcttggagtgatgcaaaagatgccatagacaactggatatccacacacaaaagaataaagttggaccccctacctcacactgtatacaaaaattaccttaaagtatcaaagtcctaaatggaaaagctaaaactataacattattagacaaaaccatagggataaatcttcatgaccttgtgttaggcaatggtttcttagctacggtgccaaaagcacagtaatgcaagaaaaaaatggataaattggacatcctaaaaattaaaacttttatgctttaaaggacatgattgaaataataaaactaacccacaaaatggaagaagtgttttgcaaatcatatatctgataagaaacttggagatagaatatgaatataaaaagaattcttacaaatcaataataaaaagacaaatagcccagttaaaatggggcaaataggtctgaatagacatttctccaaagaagatatgcaaatggctaataagcccatgaaaagatgctcaacatcattagccatcagggaagtgcaaatcaaaaccattacgagataccacatcacacccactaagacggttattagcaaaaagacagataagtttgggcgcgttggctcatgcctgtaatcccagcactttgggaggctgaggcgggaagatcacttgaggccaggagtttgagaccagcctggccaacatggtgaaaccccatctcaactaaaatgacaaaaattagccaggcatggtggggcgtgcctgtaatcccagctactcatgaggctaaggcagcagaactgcttgaacctgggaggtggtggttgcagtgagtcaagattgcatcactgcactccagcctgggtgacaggctgtctcaaaaaaaaaaaaaacaaaaaaaaaaaacagacagttaatagtaactattagcaaggatgtggagaaattagaactctgttacactgccattggtaagtaaatggtgcagctactttggaaaacagtttgaaaatgtcctaaaagttaaacatatgtatgacccagaaattccacacttaggtagctattcaaggggaatgaaatcatatgtgcataaaaaaattgtatgcaaatgttcatagtagcactattcatagtagccaaaaagtagaaacaatacaaagttccatttactgatgaatggataaatgaaatgtggtatatccatgcaatgaaatattattcagcaataaaaataaatgtagtgctgatacatgttacatcatggaggaaccttgaaaacattttggtaagtgaaagaagccactcacaaaagaccacatatcatatgaccaattgtgaagtgtcaaaaataggtaaatccatagcggcagaaactctagtggttgcctagctgggtggttgggagaaaatgggtagtgactgtaaatggatatagggtttctttgtggggtgatgaaaatgtcctaaaattgattgtggtcgtggttgcacgactctatgaatataaatcttgaattgtacacattagattgattaacagtatgatatgtgaattatatctctaaaaagctgttataaaaacaaaaaagagatgccacagggcttgttttctatgaaagaagcttgaaatatgctagaattaatgctttgctcgctgctaccacataaattctgtgaggacttggagtttaagtctttgctgtatctagaaatagaggcacacaaatagaatgctgaatgagtccctgcattggtggtccccaagaccacttgcaaggttctgtaaatctctaggaggactcctaggactcagcattgttatcttctggttctgatttgctacagtgaaagaacacaaagtaaaatcaacatagggaaaaggtgcatggtgtgcagtctggagaaatcaggagtaagcgtccaagagtcctcttccaatgcagtcacacaggatgctcttagttccttaagcaacaagctgcgacaacaagtttgaagtgttgcctactagggcactcattagagactcagtgcccaaggctactgctgggagctgatctgcctagcacatacccaaattccagactcccagaaggaaagcaggtgttcagcataaaccacactgtttgtacaaacaggtgaggcatagtggccactctataatttaggaaaaatgtcatattagtgtagggaactgtttaccagctccaattcccagctgctaaccaaaggccaacattgcaaacaggccttctaaggataggccttctcgagcctgctctgtgttaactcttttctgcacaatgaatagaagactgccaggttccaaatttctgtattatatgcaacaagcctatatgtgcaaaaggtgttaggaggaggattcagcatgccgtgggaagagtgctgccttgcacacagctggcaatacaatccatgctcatctctgaggaagaagagtctagaggggagtctgccctctggattttcctcccgatgcccagaaacaagtgaattaagacttaaagtaggccaggaacggtggttcatgcctgtaatcccagcactttgggaggccgaggcgggcaaatcacttgaggtcaggagttcgagaccagcgccaatgtggtgaaacccagtctctactaaaactacaaaaaattcgctggatgtggcggctcctgcctgtaatctcagttacttgggaggctgaggcaggagaatcatttgaatcctggaagcagaggtggcaatgagccgagatcgcgccactgcattccactgcattccagcctggtcaacagagcaagactccatctaaaaaaaaaaaaaaaaaaaaaaaagatttaaggtaacagttttcaaccagtatgatttttcccccaagaggacatacggccatgtctgaagacattttgttgtcacaactgggggtgggggatgctactagcatctacaaggtggagactagggatgtttctaaacatcctacagtgcacaggatagcacttcacagcaaagaatgacctaggccaaagtgtctacagtgccaaggttgagaaatcctgccttagagaatatttatagtgcagcttaagacagttatctagtgaatcttcaaggaggagtgagacaaataaggtaatcaggcaataactacctcaccttttatgcctgccccaactcctgctctcttttcttattacttgaagtctataacctgaaaatgagaaattctccatgcattctgcaatataaatgggctactagtaaaggatgctgtaagcagaatgaagaaggccccctcttctttgaatataattgccctgattttagggtttcagttctgtcgctcagatgggtggctcagtcattgactctggaggaatgtgcaaggatagaaatatcagccttcatattttcatcactgaattcctaatagctgagagttattcctgaccatatcatctctgagcctttcgtatttaccactgctgtttatagcctcatttccttccttctcttttcataatatcttttgaagtggaagctaatgtgaattttggtgctctccagctcctaactggtatgtctaacaccatcagattgaattaatttgaactattaagcatgaagtacatattaccatggagctgattccagatgtactattgttagtttaattgttatggctaatcattgattgtggtttttctgggtgcttgaaataataataataataatactcttttttatagtgcctttcatttgtggatcttgaaaagcctgtgtcctggaaccacttattgtaaaattgtcattatctgtgtattctcatttggctgaagttcggggaggactatgccagtgtatgattttaaaagccaagaaaaatttatattcatgaatcatgcttttttgttgttgttgcaatttaccaccttggaggaacagggggagggggaatttagcccactgggatattatttccagagagcaattctgttccttttataacaattctgaggcctttgtgttggcttggtatcagctctgacttggtaggttataattgtaaatggttctcaaattgtatgaggcctgcattctatgttgtttttcaaaccaaggcagtgtatgtgtgtgtgtgtgaaacccttaaaagagataaagcttctttggcaatatcacattttgaaaagttcaaaatgagtgagacatacagtacaaatatgtgtgttcttaatcatgtttttacatagcagaaggttggttatttggaagaggaggcctttgaagtacagtgtggtctcttgacactccaaatacttgagtagtgaagaagacagaaggtaagggcaaatgcttcccggctcacctatttcttggtgcctgatggaacactcaggagttctcacctttttttttagcagtaggaattaattgctcccacaaagcaattgcttcaacaaaacaattatgacagatttataatggaatcctgatgaattttgttaagtcatcacttaacccaaaggaccagagtcatcttcacgtgttaccatacttcctcccaacagtagttcaggcaacttggattttcccagaaaggttttcttctggcttgggtaatagatggagagtttccaccatctggctgctgtcaaggagccaggggaaatgaattgctagatttttactacatgtattcatattattgcccctttctgtgggccacagactcatgccatgattaatgaggactcttcttgacgcccagtatgctattctctggaaggctgggagaccacagtgagacaacgagtaaagcagtcacactttggctgtacgttagaatctcctgtagagttttaaaatcctcaggtgcatgggtcccaccacctagagattctgacttaattggtctgcagcagagcctggacattgagaagtgtaacatttcccaggtgattctaattgttagcccctgttaagtactgcttggggtctagtttttagcaagactaatattcaaaatatattaccattggtactgcattaagtaagctcttgctctctaccaggcactgtgctaaatgatttacaggtttcaatccatttgattgtcacaataaccatatgaatgaacattcattaattccttcatttattcaacaaatatttatggggcacaggcaacaggtcaggcagtgtgtttggctgctgggtaggaggttcagggaaagctttcaggggagatgacatttgagctgacatctaaagattgagaaggagttaaccaggtaaagagttgaggggaaggcactgatgaccaggaggatggttttgcaaatattctgtatcgggaaggaggatggctagttcaaggagtggaaaaaagaatttaccagtgcttctggagcagaggaaaccaggtggagcatcatgcaagataagatatagaggtgggaagcgaccccctcaacagaggttgtagttctgtgaaaggcttttggcctttattttgagagctcatggaagctctgatcacatttgcttttcctgggagatctctctggttgcagtaagtgaaacagaatagaaggaagcaagaggagatgcattgtaatgagttgagtggccattgcaggagatctggagagaaatgagaacagcttggactaaggtaatgaagggaaagagacaggtaaggatatttgcgtggaccttaggacttgaggatggattcaaaggagtagacgatgaatgccatctccaagtttactattattacctccaatttgcagaggagctggtcaaagcgtatgagaatttgtgtagttcttctcaaactacagtgtgaggctcttgttgaaatgtagattctgattcagtaggttttcaatggagcctgaatttctgcccttctaggaagccccaaatgctgctgacgctgccagttcatggaccatactttgataatctagggcttagagaagagaaataacttcagatgtagtagagtggagcctgcatgtgaaccttgtctgtctccctacaaagaccatgatcttaatcataaactctacagctcctgaaagatggagagttatacagcaggctaagaaatttggatttacctgtaggtgattggcagtcattgagaatgtgcaaacagacagaggtccgataagaaagtttatggtatggttttgggatatttcctataagttatttttagcatagatttttaaggtccaattggagtgtagttaaaaggaaaaaaatagcaggcctccaaactttgtaagtaatagagatggtttattagatcatctaccctgtaatgagggtaataatttgttcttatttagtgtttcttgcccaaccatcccaaggcactttactaataagcatcatctttctttcagagctaaggccaatggagagaggctaagggacttgatacagtggggctggctgttgggcatgccttcaccatttctgtggcatctagattgttctaccacagttcaggtatatgcctgagcatttgccttaattgtttgacctgtctgtatcaatatttccctgggtgtgtcccagagaactctagcccagtcagaagctaaataaaaaagcatcaaagtatcaaaagtttgaaaaatgctgcatgcttttttcttcttggagaggtgtaatgcacattagtacagaagggctctgagaagttccacagtcaaaaaaatttgtttaattctatataactcatgagttttcaaattaattggaccttagaatgaccaacttttctctctctcccaactcttaacattccattaaagagttgttctgtctgatagagtttatgaaatgctattctgtaatcatacataactataatctttgaatgtatcaatatcagttgcctggggctgtgttcttttcatgagtgactggcagatttggcattttcgcatctagaagaacattataacctagtttttactttgcctttccttaagcccagtgcccttacaattgttaaaatacatgtctctacttcattggttagctggaaggaaaatcactgatttatctacatgttttcctgttgtctggaaggggtgagttgtgcttttgtttctttgtttccatgtgtttaattccattttggcagccatagaatgttcctgcccactctgtttcatgtgaaagatcccaggaataggatcattacgagacatgacatttacattgagtcatttttttatgttaagtgcataacatgaaacttcgaatggtttttaaaaatctgagtcagtttggtaatttgacagtaaactaagtttgtcttttctcttgaagaatcttgcataagataaaaccttttaaaaaatcagactatgtttagtaagcattcatataaaaccatgaaaatatggctaaataaatttcaagatgttggtgaaataacatacaaggttgagatccaataccatactgacagaatgaaaacaaatataacaacagaaaactatggaaagttgcattttaaaaaacattggctattttaaacaacaaatttatagctgttgaatagactctgtccaaatgatgcctgagtatcctaagccgtgtgtgtgttgtcttcagcttttgttgagctgatttcttgtagacagctataccatttttagtctagaaaaatggctgtcacattttggtaggtggcagagttggctaagtagttccttgaaaatacagatgctcaggtttctaattaggtagttcaagcatggcacaaagaaatttgtgttttcaaccccaagacaggtaattctgatgcacataaagttgaagaacaactgctctagaacacttaaagttctactataaccaagattcacatatgcaatttctttaaaaggcaaacttcaagctcaaatcttcgctaactgtatacctttgtgcaaggtgtgcagtgtacaacctgcgctgctgctcgggtagccctgcctcctcctcagatactctgtttgagtaggcccatgatgggtttcaggaatatgcattttcaccccacctttattaaggtatagttgacaaataaaacttgtgtatatttacagggtaaaaagtgatgttttgatatatgtatacattgctaaatgatgaaatcaagctaattaacatatccatcatctcataaatttttgtggtgagagtagatcttaaatgctactctcttagcaatttaagatctaacctcttaccaattttcaagtataaattattattaactatagttattatgctgtataatagatctccaaaacttacttatcttgctttactcaaactttgtaccctttgaccaacacctccccatttttttcctctcccacaccacagcccctggcaaccaacgttctactacctgcttctatgaattcaacttttttagattctacatataagtgagatcatgcagtatttgtctttctatgtttggcttatttaacttagcataacattccccaggttcattcgtgttgcagatggcaagatttccttctttctaaatgctgaatagtattccattgtatatacagtcatgtgccacttaacaatggtctggtcaatgacagactgcagatatgagggtggtcccttaagattataatggagctaaaaagttcctattgcctagtgacattgtagtgtgctaatatcatagcgtcacgaattactcacgtgcttgtggtgatgctggtgtaaacaaatctactgtgctgccagctgtatagcacatacaattacgtacagtacataatacttgataatggtaacaaatgactgttactggtttatgaactatctactgtgctttttatcattattttagcatgtacttctacttattaaagaacagttaactataaaacagtctcaggcaagaactccaggaggtattcagaagaaggcattgttttcattggaggtaagaacttcatgcctgttactgcccctgaagacctgccagttggatgagatgtggaggtgggaggcagtgatattgatgataccatccgggtgtaggcttaacctaatgtttgtgtttttcttagtttttaacaaaaaaaagtttaaaaaaataatacaaatatttaaaaatataaaaaagcttatagaaaaaggatataaagaaagaaaatatttttgtgcagctgtacgatgtgtttgtgttttaaattaagggttttttgcatgtgtgtgtgtgtgagtgtgtgtgtgtaagttttattgagacagtcttactctgttgcccaggctggagtgtagcggtgtgatctcagctaaactgcaaactctgcctcctgggttcaagtgattctcctgcctcagcctcccgagtagctgggattacaggcatgcaccaccacacctggctaatttgtttgtatttttagtaaagacagggttttgcaatgttggtctcgaactcctgacctcaggtgatccgcctgccttggcctcctgaagtgctgggattacaggcatgagccaccgtgctcagccaaggccacattttgaatctagaaccacaatgctcaaagggtgcttcacagactcctggtgatccctgagatccttccagggagtctgcaaggtcgaaactatattactgtaatactaagttgctctttttctttttcactatgttaatattttcattaatgatgcaaatgtaatgttttgttttgttttttattattattatactttaagttttagggtacatgagcacaatgtgcaggttagttacatatgtatacatgtgccatgctggtgtgctgcacccattaactcatcatttagcattaggtatatctcctaaggctacccctcccccctccccccaccccacaacagtccccagagtgtgatgttccccttcctgcgtccatgtgttctcattgttcaattcccatctatgagtgagaacacgtggtgtttggttttttgtccttgtgatagtttactgagaatgatgatttccaatttcatccatgtccctacaaaggacatgaactcatcatttttttacggctgcatggtattccatggtgtatatgtgccacaatttcttaatccagtctatcattgttggacattttggttggttccaagtctttgctattgcgaatagtgcctcatatggtatggttttaggtctaatgtttaagtctttaatccatcttgaattgatttttgtataaggtgtaagaaagggatccagtttcagctttctacctatggctagccagttttcccagcaccatttattaaatagggaatcctttccccattgcttgtttttgtcaggtttgtcaaagatcagatagttgtagatatgcggcattatttctgagggctctgttctgttccattgatctatatctctgttttggtaccagtaccatgctgttttggttactgtagccttgtagtatagtttgaagtcaggtagcatgatgcctccaactttgttcttttggcttaggattgacttggcgatgcgggctcttttttggttccatatgaactttaaagtagttttttccaattccgtgaagaaagacattggtagcttgatggggatgacattgaatctataaattaccttgggcagtatggccattttcatgctattgattcttcctactcatgagcatggaatgttcttccatttgtttgtatcctcttttatttcattgagcagtggtttgtagttctccttgaagaggtccttcacgtcccttgtaagttggattcctaggtattttcttctctttgaagcagttgtgaatgggagttcactcatgatttggctctctgtttgtctgtcattggtgtataagaatgcttgtgatttttgtacattgattttgtatcctgagactttgctgaagttgcttatcagcttaaggagattttgggctgaggcaatggggttttctagatatacaatcatgtcatctgcaaacaggaacaatttgacttcctcttttcctaattgaataccctttatttcctcctcctgcctaattgccctggccagaacttccaacactatattgaataggagtggtgagagagggcatccctgtcttgtgccagttttcaaagggaatgcttccggtttttgcccattcagtatgatattggctgtgggtttgtcatagatagctcttattattttgagatatgtcccatcaatacctgatttattgagagtttttagcatgaagggttgttgaattttgtcaaaggccttttctgcatctattgagataatcgtatggtttttgtctttggttctgtttatatgctggattacatttattgatttgcgtatattgaaccagccttgcatcccagggatgaagcccacctgctcatggtggataagctttttgttgtgctgttggattcagtttgccagtattttattgaggatttttgcatcaatgttcatcaaggatattggtctaaaattctcttttttggttgtgtctctgccaggctttggtatcaggatgatgctggcctcataaaatgagttagggaggattccctctttttctattgattggaatagtttcagtaggaatggtaccagttcctccttgtacctctggtagaattcggctgtgaatccatctggtcctggactctttttggttggtaagctattgattattgccacaatttcagatcctgttattggtctattcagagattcaacttcttcctcgtttcgtttagtcttgggagagtgtatgtgtcgaggaatttatccatttcttctagattttctagtttatttgcatagaggtgtttatagtattctctgatggtagtttgtatttctgtgggatcagtgatgatatcccctttatcattttttattgtgtctatttgattcttctctctttttttctttattagtcttgctagcggtctatcaattttgttgatcctttcaaaaaaccagctcctggattcattaattttttgaagggttttttgtgtctctatttccttcagttctgctctgattttagttatttcttgccttctgctagcttttgaatgtgtttgctcttgcttttctagttcttttaactgtgatgttagggtgtcaattttggatctttcctgctttctcttgtgggcatttagtgctataaatttccctctacacactgctttgaatgtgtcccagagattctggtatgttgtgtctttgttctcgttggtttcaaagaacatctttatttctgccttcatttcattatgtacccagtagtcattcaggaacaggttgttcagtttccatgtagttgagcggttttgagtgagtttcttaatcctgagttctactttgattgcactgtggtctgagagacagtttgttataatttctcttcttttacgtttgttgaggagagctttacttccaactatgtggtcaattttggaacaggtgtggtgtggtgctgaaaagaatgtatattctgttgatttgagttggagagttctgtagatgtctattaggtccgcttggtgcagagctgagttcaattcctgggtatccttgttaactttctgtctcgttgatctgtctaatgttgacagtggggtgttaaagtctcccattattattgtgtgggattctaagtctctttgtaggtcactcaggacttgctttatgaatctgggtgctcctgtattgggtgcatatatatttaggatagttagctcttcttgttgaattgatccctttaccattatgtaatgggcttctttgtctcttttgatctttgttggtttaaagtctgttttatcagagagtaggattgcaacccttgcctttttttgttttccatttgcttggtagatcttcctccatccctttattttgagcctatgtgtgtctctgtatgtgagatgggtttcctgaatacagcacactgatgggtcttgactctttatccaatttgccagtctgtgtcttttaattggagaatttagtccatttacatttatagttaatattgttatgtatgaatttgatcctgtcattatgatgttagctggttattttgcttgttagttgatgcaatttcttcctagtttcgatggtctttacattttggcatgattttgcagcggctggtaccggttgttcctttccatgttcagtgcttccttcaggagctcttttagggcagcctggtggtgacaaaatctctcagcatttgcttgtctgtaaaggattttatttctccttcacttatgaagcttagtttgtttggctggatatgaaattctgggttgaaaattcttttctttaagaatgttgaatattggcccccactctcttctggcttgtagtatttctgccgagagatcagctgttagtctgatgggcttccctttgtgggtaacccgacctttctgtctggctgcccttaacattttttccttcatttcaactttggtgaatctgacaattatgtgtcttggagttgctcttcttgaggagtatctttgtggcgttctctgtatttcctgaatctgaatgttggcctgccttgctagattgtggaagttctcctggataatatcatgcagagtgttttccaacttggttccattctccccgtcaccttcaggtacaccaaacacgcagatttggtcttttcacatagtcccatatttcttggaggctttgttcatttctttttattcttctttctctaaacttcccttctcacttcatttcattcatttcatcttccatcactgacaccctttcttccagttgatcacattggctcctgaggcctctgcattcttcacgtagttctcgagccttggctttgaactccatcagctcctttaagcacttctctgtattggttattctagttatacatttgtctaaatttttttcaaagttttcaacttctttgcctttggtttgaatttcctcctgtagctcggagtagttggatcatatgaagacttcttctctcaacttgtcaaagtcattctctgtccagctttgttccattgctggtgaggagctgcgttcctttggaggaggagaggcgctctgctttttagagtttccagtttttttgctcttgttttttccccatctttgtggttttatctacttttggtctttgatgatggtgatgtacagatgggtttttggtgtggatgtcctttctgttttttagttttccttctaacagacaggaccctcagctgcaggtctgttggagttgctagaggtccactccagaccctgtttgtgtgggtatcagcagtggtgtctgcagaaccatggattttcgtgatctgtgaatgctgctgtctgatagttcctctggaagtattgtctcagagaagtacccagccgtgtgaggtgtcagtctgcccctactggggggtgcctccctgttaggctgctcgggggtcaggggtcagggacccacttgaggaggcagtctgcccattctcagatctccagctgcatgctgggagaaccactgctctcctcaaagctgtcagtcagggacatttaagtctgcagaggttactgctgtctttttgtttgtctgtgccctgcccccagaggtggagcctacagaggcaggcaggcctccttgatctgtgatgggctccacccagttggagcttccaggctgctttgtttacctaagtgagcctgggcaatggcgggcgccccttccccagcctcgctgccgccttgcagtttgatctcagattgctgtgctagcaatcagtgagactccgtgggtgtaggaccctccgagccaggtgtgggatataatctcctggtgcgccatttcctaagcccatcggaaaagcgtggtattcaggtgggaggggcccgattttccaggtgccgtctgtcacccctttccttgagcaggaaagggaactccctgatcccttgcgcttcccgagtgaggcaatgccttgccctgcttcagctggtgcacggtgcactgcacccactctcctgcgcccactgtctggcactccctagtgagatgaaccgggtacctcagatggaaatgcagaaatcacccatcttctgtgtcgctcactctgggagctgtagaccggagctgttcctcttcggacatcttggctcctccaaatgtaatgttttttaaaactactggcaccatagcatgaatcaagacagtggcactgaactgtacttttggcctttcatttttcactgccatgcactatggttaaaaaaaataaaaagtcaactttttctaagaatatccttgttgaaaagtaaaaattattaatttaattgcattttgattgttgagtttttttttttttttttttttagcattctgtgtgctgaaatgggaagtatgcagaaagaactgctgctgtgtactgacatatcatggttgtctcaaggaaaagcacttgtgagactgggtagtgaaatgaaccagctaccttttatatggaacactatttttctgcatgaaagaagcattgaaagacaaactataattatgcaaactcaagtatttaacatattttctttaaaatgcacaaagtgagtctgttgctttaagtaaaccgttggccagtatttgttgatagtgataaaattcaagcttctaagcaaaaattcagattttgggaaacttggatatgccaccatgagcttgacagcttcccaatacttaaagactttttctaataaaaggtcaatgatgatattgcaaatataattcttttttatatcatgcaatgaaaggtgtcaacatttggaagatctgcataatccaatgaaccactatttttgtccagagcaatgtgcacttttacaaaatttcacatggggaaaggatccattcaaaatgctacacagaccatggatttttcacataacagagcactaaaaatttcttgatgtggtttcgggttctactctgcaagtaacttttaaagaaactaccatttgttaagttttgatgcagtattagagaaaaaatccagttatttgaaaaggctattaaaatattccttctagattttcttggcacacttcaaccctaataatatatcacaacacaatgcagaaacagataggagaatccacctgtcttctattaggctaaatattaatgtgatgttgagacaatgccactcttctcactagctcttttttcgggaaaatatgtatatttacatgtaattggttattactgtcattttaaaataaattcatagtgttttgaaagttttctgttttaatttctaacatggtaaatatccatagatataaccaacataaccacaaactctttggggccttccacagtttttaggagtggaaatggatcctgagaccaaaatgtttgagaactgctgacctagagaaacattctctaaagtacgttccatagaatgctctgccttgcaatgcgctatagaaacccagttgccagaaacaaaggcaatataaagcaggaataatttgtggttgaagaagtttacaaatgttactagctacagccccccatggagattcacagttggtaatagcacattaaaagttcagcttgaacttcattccaatatcactctttcccaaactcttttgtccacaaaaacattttcccatggaataagctttggggaatactgttcccttgccaacaatgagtcttaacattttaaatatattgcaaagtgatggattaaaagtggtatgtcctcattaattggctcctaaagtctggaattttaattttagggccattcatgttttcctttagaacagcctccagccagtaacttctctactcaagccaccagggaggtaaaaggtttgccaattacaggatagggtttcactacattcgcctttttcagttcaataaatcagattgtttttcaggtctcaaagacaggcaaattcatgaaaaccagtgatggtaaaaatatgtcatgggtgtcacatatcaatgaacttgggaagggtttctataggggctgaatacaactgactcagcaggttgctggcattacttgaaatgaatgtgcttttggtaggagctgatttcttctttccatgtaatggttagtcaatcatacatgctctctggtttggattcctctggcaaattgcccattagtaaggctgtgtaaataagcagagtctgttttaccaccacagatctttctcctagtaaatgatggtgaattctagcttaggaatccgtttgctgatactaattccataattactaggataaaattatacttgaatataagccttgccaaccactgtattttcactttgaatctatactaagaaataaacagaatgtgagttaaatgtgtatttatgaagatgttcactggagcattatttataataccccaagttgaaatcaactaaaatgctgacaaatgtggaaataattgaaaactatagcgtattcacgtaacaaaatgccacacagagttttaaaactctagcttttgaagactatttaaaaatatgcaacagtatacccaaactaatgtcaggaagataaaaacatcatgataaattttgctggactgttttccagaaaggacattccaatttacatcctcaccagcatctgtttgggagtgcttctctctctgcattcttgccaactgtgagtgttattttaaacaatattttctaatctgataggataaaaatgatatgttattcttatattaaggaggcattcaaaagggaagacagaacagtaattggcacttccagaagagactgctggactctaattgctaccttgtaggcagaacttttggctgcattgactgtagatgggttccctctgattactgacatctgacatctcctggaagacagttctagagcctagggaagtgatttgggcctagaaattaaaaataaccatgaaaattccacctagttaaagttgtagtcatttataatttatccgtggatagattcaataaatactctgttaaggtcatctctatccatgtgtaaaccccccaaataaacatttaatagacttagaggcagagagagaatatatgcctgtcagtctcctgtgtcagtggctttgccattataaagttatagtagatcatagaatcatctgtaaggtgattaaaattgtcatcacggtttccatttttcacatcctttacttaacagcatgtatgcaaaaggtttgcagagtgcctgtgggctttttggagctactaaagggactcgtttcctattccattccctgccacttaccgcagaggtgccagtcatgcctacagaaatattttgtcatagtcacactgcaactgggtagaatattgaagtaaatgtcaaaaatgtagccatgtgaaaagaatcagaaggcagtgttgttattcaaagagttttcttccggcttgggctcctgtctgcatggagcaggctggatgtctaatttcagcagtacaattaattctcggacaagatgagaaaagatgtaagtgccacaattgtataacttggaagttgcttcactaattcatgtgcttattttctttgcaatttcatctgaaagcatcttttgatggctttttgatgttgttgaatttttaaaatcttttgaatgatgaaaatggacaaaaacagaattcagcaaaatgtaaatgaatcagaccaaatgggatgcaagaatatattgtgcagatctggaatggaaatagaaatattttttcttcctttttgaggagaattataaaactttccatagtgtgtcagacatggtgtttcgccttctctgttcccaaacgtttaaaaggtgacaaaatgctgttttaaaatgtcgaggtaattattgttcactctgataataaattaagtgttcattctaacccaaagacttgtcctctaaccctgatatgatctttcaacaccactgtgaatttattttttaaaatcatgattccacttttaatgttttcacttttgcacctttcttttcttttttacttaaagttctgggttacatgtgcagaacgtgcaggtttgttacataggtatacatgtgccatggtggtttgctgcacccatcaacctgtcatctaggttttaagccccgcatgcattagtcctaatgctatccctccccttgccccccaaacccccaacaggccccgatgtgtgatgttcccctccctgtgtccatgtgttctcattgttcaattcccacttatgagtgagaacatacgctgtctggttttctgttcctgtgttagtttcctgagaatgatggcttccagcttcatccatgtagtgccgtctcttattataattatgataatatcctagatgtagatgttaaagaatattctggactgagtcatggaaaatagctattgtctgttaaataaaagatgccatgacaatggcctatgtgtggcttgaaatacatttttgagaaggctgtaacaaaaaataatatagttataatatattcttattcaaaggaaggatgattttcaacctttattatacgacagagaggtcacagtattaagagggtcagctaggacttgctgggatggtgtgtggaggacagctggagagatggtgggtgtgagacgcatgtgtagcttcttaactgagctgtagaatgtttagactccgttcagtaattaagtagtgttttcaagcttttgtgtatatgtgtatacaccatttacacctacaggagtatgttcttcaaagccttgaacatatttactggaaaccatgaatttcaaaatagtatttttctcaaagggatctggtaatggcataaaaccaccatagccaagtgatccctagagaccaacgttgaatttcaaacccgaattcaatagaattgcttttccttttctattttttaaaaaagtacattaaatccaaattagtgtcctgtatttctatcatctttctctttcttgtcttatttttgtgacttctttttgcaacttggggtgacaagccttcacttcattagctttgcttgcctgactctgaaacaaggtgaaggttcttatttccctttggtctccattttcttatctgtaaagaaggttattgatgcctttaatgttgctttcatctctgaagttctatgtttatgtctccttcctcttttatcctgcttccattatggatttactgtgaggataaaataagaaaagtgtcatgaaagtagtttgaaaattgtaatgcagtgtaaaaatataaagtatgattgttgctatcttgtatcattctctgtggtttctcctatgtttacaagattgcattttccaggtgtgtagtaccttaaacttttttttttttttttaattccacagtggacttaacagagtatgtgctaaagaaacacctatgggttggttcattcttcagccagggatgtttatttatctcttggacagagtggcagtcatgtgaagctcaccagttaaatagtttaattttaggcatttcttgaggctaaagagcagacttatcagcctctcaagatatctctgagaagtaagaatatgttagttttccagagaatcaagtagttgatggtaagttttaacaacattattttttaggaagcagctataatgattaatcagacgactgaccagtaaggaaggtatgaccctgacagaattggatcactttattcttcctttgatttgtatttaaaatccaaatagaatggcattcaacaaattaagatgcagaagctaattgcaaaaaaaggttcatttttcaagttgtttttctgtctctttctgcctggagcaaagtcttgctctatgtaacaataaccccttgaaatgtcatttagatcagaagtgctgatgcagcactaatgattttagagcaaatatgttactctaatttcctccatctgctatgaataaaagaatatgtttgtgaagtctgggagagctgtagagaaaattgttttgtagaaaagttgaagatattttaaaatgtgtgcaggtgtgggggaaaaataattctttttaaaattttgtcaagtatctaaaaaaatagaagctttattgtagctcagtggaaatgtcataaacttttttagcatacttttgataagactttaggggagtagtaaatgacttgaagacaaaccatctaggtttcattgtgacacagtcctgatgattcaaataaaaacatttgctttggtttgtttagagattctaactagggatgagaactgctcttattcccttgatgattcattttattcttggaagactgtcgtcttctgatttaatgcatatgtagtcgtgtgggaggaagatggtatgtaccctcttagcttcccttggtcaactctgccaatcaatactggtacggctagattttttttaaaaaaaaattttatagccattcactttcaaatctaggaaaatgatgattctttagaaaagtatatatacattcagtattatattattcccataggcaaaataaaaacatttaataccaataatcatagaagaaagtggaaaattattaaacatgtaccactagaaaaaaggcaccaggcccagatagttttacatgtaaactagatatttaaaaacaggtactttaaaagattaaaagatacttgtaacatacgaaagctttaaaaaacagatattccctatggttcttaaacaattcaagactatagagaaaatagaatggggctcaactgtacaaatctagcaaaatgttatatcaaaacttgagataaataacactaatgagatattttatgctaatttcattttcatatgtggaagtatataattaaaaaatagcaacttgtatctatctgcttatgaaaacatgataaaatgtttaaaataggcttcatttcaaaaattacaaactggttctgaattggaactttataccattaattaaaagattaaatgatttgattatacaacatatgctttgttaatttcctaaaaccaccataacaaattaccgtttggtaatttggtaatgagtggcttaaaataacagacatttattgtctgtcagttttgaaagctagaggttcaaaatcaaggtaccagcagggacatcctgcctttgaaggctctaaggggtggccctcccttgccttttcctaccttttagtagctgccaacagtccttggcatttcttggcatgcagacacattactccagtctctgtctcctttatcacatggtattctctctgcgtgtctgactatatctctggttttgcttcttatgagggcaacagtcattgggtaggggccgctctaatcccttatgacctctaattactgtaatctaacaaattacatctgcaaagacccagtttcaaaataaagtcacttgagattccacatgactataaattatggaggactgtattcaactcagtatgcatactgataagaaatgtgataaaatgtattagaaatttctagcaatactctaaataaaatgggcatggaaggaagttaaacacaataaggaatatttataaagacctataatcaaacattacattaaacagtaaaatataaaagtcactcatattaaatcaggaagaatacacaggaatatttgctattagcactgttacttagcactgtgttatgggttctgcttgttgtaatcaaacaaaaaaattaagcgaagaaaatgatactctcttcactgtcatgtgatatgattatattcatagagaatttatgactgttacacagttactaagaaaacatgttagctggatgatcacaaaataaatatataaaaatcaaattttttctttatactttcaataactagttatctagaaatagaaaaaaattactttggaaacaaaaaatataaaatccttagtaacaatttaacaaaaaaggcctatatagaaaaaagaaaaatgttatggagataaaactgcctgtcaaaagagtcatactcatattccctaatagtttttattattataaaatgtcattcattcctataaaatagatatgttaatataatttatcagaatggcaacaggtttcatttttactttttcttctaaacattaaaatgtaatataaagttactgttattaaaatggtatgttgttagccacgagaacattttataaatgaaacagaaaaaagagaaacagatccaaatatatgaagttaatattcagtaaaagtgtcttttcagctggatgcagtggctcacgcctataatcccagcattttgggaggccaagatgggcagagtgcttgagccccaggagttagagaccagcctgggcaacatggcgaaaccctgtctgtataaaatatacaaaaaattagcaaggcatggtggcgaaaccaccttggcaaaaattataactgagaaaattatgacagtgaaagagatctgaccttactgattccatcttgcttctaacctccaagctttccttgttcattcctgggtgtaggctgaactaacttttgggaggaactcagtttatagtttaactttgaaaaaagatgataacagccctttcccaaaacaaacccccttcctgtctggggactagactgcctttataggactaacacactagctacaagattagaaattatggtttaggagtcatgcagctggaggctgcgagattctaaacctcccaaatcgctccacagggaaacatcactattggaaaacctaagatcagtacttgagctattttgtagaccctacactccatagatcagctggcaccacctagatggataaactgactcatctggtcttgtggcccccacccaggaactgactcagcaaaagaggacagcttcgactccctgtgatttcatatcccacccaaccaatcagcactcccccctttccgaccccctatccaccacattattcttaaaagtttggatccctgagtttgggggggagactgatttgagtaataataaaactcccgtctcccatacagcctgctctgcgtgaattaaactctttctctattgcagttccctcgtcttgagaaattggctctgtctaggcagtaggcaaggagaacccactgggcaattacagtggcacatgcctgtagtcccagctactttggaggctgaggttggaggatcaccagagtcagggaagtcgaggctgcagtgagccgaggtcactcccctgcactccagcctggacaacaaagggagatcctgtcttaaaaaaaaaaaaaaaaaagggtcttttcagttcagttgggaaatgtatgtttatctaataaaagatgctatgaaaattggcttttcatcagtaagttgtaaatgttagaccactattttttacaataaaaatctaaaaattcagatgaattaaatatatgaatgtacattaaacaatataaattttagaaaaataggaattcttagacactgatgacatacagttatataccatatttgagaaaaatggctagggatattaattggcaattcacagagggaaaatttaagtgaccaagagacatgcaactctgctcaactttactagtagttgtggaaatacaaattaaaatcacaatgaaataaatacttttccagtcaagtagttgacaaaattggaaaatattgataatatccatgcttgttaaaggtgcttagaaatggaagagtttcatatattgctaaatctggatatatttatcaaaattaatggtacacttgctctttgactctgcaaccttaattttgggagtcagtaatctctgatgtgaaaatgtatatttaaagatggctgcatttttagtagtggcaaaaaaaaatcaagacaaataacattaacataaaaacagcacatgaatagtgagattgttgaatatatttatactataaccatactgtgaaatattatggaactaataataataactaaatacatctatatgtgatgtccagcatgtccatgatatggcagcatctaatcatttgactaattggaacgatatgagaccgttggaattagaaagcaaagaatgactatatcaaaacctgtttgtatgtactggtatgaaactagaaaaagatgtagaaggataaacaagtaattgtttctattttttgttttgttttttttagttgccatgggaaaatggaattggaaatagtgctgggatagcgtattgacttattttatataccacatacatacatacctgtgtatttttttttttttttttgagacagactctcgctctgctgcccaggctggagtgcagtggcgtgatcttggctcatggcaacctctgcctcccgggttcaagcgattctcctgcttcagcctcctgagaagctgggattacaggcatgcaccccacacctggctactttttttgtattttttcaccaggttggccaggctggtcttgaactccatgacctcagatgatccacctgcctcggcctcccaaagtgttgggattacaggtgtgaaccactgtacctggcgtatgtgtgcatttttgtttaatttgttatgctgagtattgtttttaaaattaaaatgatttttctcattgtgtgtgtgtatgtgtgtatgtgtgtgtgtgtgtgtgtgtatttatcttaaatcctaatggtgttgtactttaagataatgcttttttttttttaattttttttttattatactctaagttttagggtacatgtgcacattgtgcaggttagttacatatgtatacatgtgccatgctggtgcgctgcacccactaacgataatgcttttatcttatagaaaaatgggccaaaattcaaaatactttacaaattaccatttgaaacgtatctgaataatgattcacaaaggaagagttataaaacaccagtaaaactctcagccccattagttatcaaagcaataataattagagcaataatgacatttttgctcacactgacaagtatccaaaaaattgatatttctcagtattatacagtagagggaaatctacctaccttgcttagtaaactttctggaaggcagattgacaatattaaccaaaaggctctaataatgtttatactttctggtccagctatactatttctggaaagtaatactaaggaaataactgcaaagatgtgtgtatggatgctcatttcaattttgtttatagtagtggaaaaagctgtaaatctatgtactcataagtagttgggtatttaaataaattcacttaaaagttatattttacaactatacacacacagagatacccataaaacatttaaaaggtgtaatgaaaatttttgtataatgatacagattgttacttatggcatagaaagatgttcataaaacagttgattagttttgattgttatataatatcatctaattttgtgatacgcttatgtattaagatgaatgggagtataaacaccagactgttaaaagtcagtttctctgggtgatgtgctaatagattattttttatatttctgtattttttgaactttttgaaatgtgcttgatacacttttattaagaaaaatacatgaaagtttgtccaaaatcctaatttttaaaaaagcacacaaaggaccaaactggaaatgctttaaaaattaaaaagggtaggggagcaataaaacaatgtaaaatatatatagactcagtgaagaaagcatggcttattactattaatagtcttaatagtgcaagttgttagttgataatgtaggcctattgagagacctgttggaaggtttgttttgagcccattgttagcttaaatatctgaccttttctatttagctccccagccataggtagtttaacaaaaggttcttcactaacacatttactttatgcggtttgtttgggggtgaggtttgcaatttttctccagggagtaaattacttcatgtagcttgttctcaaacacttatctcagaagccgcacacctttctgatagaagccaaatgtcatgactgaaggtatgggacaaaagcctgatttatattcctgaaacgcctcttttatgttctagaagccaaatctgcattcttatggagtggtgtagaatgtcagtacaaatgctgtatctatgctgaacctggaaaggaaaaaaaaagccacactccacttctttatttagagtttgcattgagaacagcaagcactatttgaaaggtcatcccatttcaagtagcagatggataggaaaaaaagactctggcttttacaaataatttaattgaattctccttgccatttctgcaggcaattcaggatattttttaaagcattgatccataattatcgctcagagtggttagcattgttagacagatgtgtaattctttgtgtgtataagggagcaatacagcatccattttacctatttgattgtcttttcttttactgtgtaaacaaatgcacataaaaacgacacatcattgctttacaaaaaagaagcaaattaattttttttccagatttgtttttgacttgaaactctcctttctaaggcatgctgtatttataatggtcagcttctttgccttcctttaagtaaattagtttgggtctaggtagcatacttatgtttatagtccgctggacacaaggggtcagaaaccatgaaacacaaatgtatcatattaatagaatatgaaatgaaatgactaagacttttaagaatgcattttatctgtggtttattttcctgtcttttaaaatatatatattatttgtaatctaaccatgctattctgattggtttacaattgccagataaaattcaggatgcccagttaaatctgaatttcagagaaaaagaatgaacacctttttgagtataagtgtgtctcatgtaatagattggagagtcatctcagaatgaaacatactatttaaataaaattgtgaaatataatttgtacaggaaaagtgcatatgacatgtatgaacagtttaatgaataactataaataaacacctatctcaaggttcacccaagtcaatacattgtatttctagcatccccagcagtcctctgaaaattccctgatctgaaccctctctctgatcatattagaggtagtcactatcctgtcctttgacatatccattttccttcattaattgatacctttattaccagcttaggtacttgcaatcactgtaagttctgtatattttaaattttatataaattgaattatactgcatgtatttgtaaaggtgaaatattaataattcaatccaatttgggggaaaatactagggataactttccatcaaattatacaattgacaacttgagtatacttgagttttccatgtaggagagactaaagggtaatcctttaaaagaaatcttaatgagtgcactcatgttgctagtgccacaaatatttacttttaaaaaaatactcttcccctcaaaatgtttgttctcccacgcatcattgattttccagaacttggggccagtccagtgatactttcactggatttctgttgtgttgatatcagtggagtaaatcacatcttcaacctaaggtcgtaatgtttaccagtaaatggataaagagccttttgatttattattcatgtagatatcaatgctcaggatgactaaggaacattcccttttatctcataaattttatctagtgacatttaaaaactgtcttccggagcccagccctctgatccacagactctctttccttttgtggatggcaccgtgttctgctgtcctcacttctcctttatcgccttaatgctgagaatggcacatttttccaagttgctttgaagagcaaccatcacaagagcaaaagtaataaaaagcaatttaaaaacagatttctggatgttctaggaaataggcaattttgcatggcaagcacttgaacccaggggtgatttattattcatttgactgtagtgaatattcatggcttttgcatgttaaattagaattattgagatttttgtttaccctgaagaagtatgggaagtcgtgtctttaaaatttgaatgtactgaaattcacttttcaacgtatggagaacttcctttctagaaggaaccttaagactgatctggttaaatctgctagggaatgtgtataaaaacattcagtgttttgtaagacctgtactgatatattttatatgaggctcatacatatagagccatggtttccttccttccttccttctttccttccttccttcctttcttcttttaaagcagcattaccctttactcaaagaaaatcttgcttgaaagttaaatatgtaaaagagctagaattactttgtttgcatacagagtgggactgggctgcacactctccttatctccattcctccgtacaaagcccttggttttccataatcacagctttaaaaccattcatgtacagctgaatagtttgtcagacatgtatcagatactagtctaaacacctaacaaatattaactctttaattctcacaacaaccctcataatggttattattacttccattttgtaggtgagggaagtgaggtacaaagaagttaaatacgttgctcaagattacagcttgtcaatggcagagcctctacaatcttgtcccagcgtccctgttcttacccagaatgctttgcagcctctccctagcagcagcagcaattatgttgaactcttgttagggattaggcactctgctacaagctttacatgaattatcacagctgatcctcccaaagcagccagtgaggtaacagtattatcccccagtttacagatgtaggaaatgaagcataaataatttacataacatttctacaaggggaagaccagcatctgaaccctcacagtttgactttggagcccattctcttaatcactatttcataagttctcatacaaatgaaaacatttatatatttcttttttgttgttgtttctgagacagagtctcactctgtcgcccaggctggagtgcagtggcacaatctcggctcactgcaacctttgcctcctgggtttaagtgattctcctgcttcagcctcccaagtagctgagattacaggtacccgccaccacacctggctaaatttttgtatttttagtagagatgggcttttgccattttggccaggctggtctccaacgcctgaccttaggtgattcacctgtcttggcttcccatagtgctgggattacaagagtgagccacagcacccggcctacctttatatatttctaaagtgttttaatggttttcttttttttattattattatactttaagttctagggtacatgtgcacaacgtgcaggtttgttacatatgtatacatgtgccatgttggtgtgctgcacccattaacccgtcatttacattaggtatatctcctaatgctatccctcccacccccacaccccacaacaggccccggtgtgtgatgttccccttcttgtgtccaagtgttttcattgttcagttcccatctgtgagtgagaacatgtggtgtttggttttttgtccttgccatagtttgctgagaatgatggtttccagcttcatccatgtccctacaaaggacatgaagtcatccttttttatggctgcatagtattccattgtgtatatgtgccatattttcttaatccagtctatcattgatggacatttgggttggttccaggtctttgctattgtgaatagtgccgcaataaacatatgtgtgcatgtgtctttatagcagcaatatttataatcctttgggtatatacccagtaatgggatggctgggttaaatggtatttctagttctagatccttgaggaatcgccacactgacttccacaatggttgaagtagtttacagtcccaccaacaatgtaaaagtgttcctatttctccacatcctctccagcacctattgtttcctgactttttaatgatcgccattctaactggtgtgaggtgatatctcattgtggttttaatttgcatttctctgattgttttctttctttctttcctttctttttttttttatttaatgttgcttcacattggctagtaatgcaaagagagcatcgggttttctgaggagcctaaacatagctctgccaggcaggatcatgcccagagaaaacagtaaaggtcagcatcttactgttccttacccatgtttttatggtgttcatattgcctttctggtctttcccaaattagctggtttaatttcctcagtattctttgcagctttactaaccaatgtcatcaagtaattatacttatttgacaagggctaatgcttcttctcctaggtcaatctatgttttgacttaatcctgctgggaataaaaagtcttcatccagtttgatgtttgcaatggtggaaatgctgggttctgttgcagactaatagtagaggatgcctctttctattcagtgctggtgtagctaaagagctatgccaccagaacaattgtgtccaatgtgcaagcataaaattatttttatagtaggaccagtgagaagcctgatgttgtaatatctagtacttacagatgaatgagtttatgctattcactaaactatagtgtactttgggcctttatctgctgtacagaaagtttgcaggacgaggtcaagtgaagagtactggctgccatggggccttcagcactgacaaggcagaaggtgctgctgtgttaactctgtaattatgtgtttattttagaaaagtatagtctactccttagacttaatatgcctttgtcaattccctcttaatatttacccacgagtttagcctctttagttaaatcttgggtaaacacagggattttcagaggctggtgagtagagaaatatctacttggtcacatcagaacatatagaaatcttgcttctactagcatcctatctagatagagagaaactttaaaaaatattgtcttttactccttccccaagggaaattactgctatacgaaattaaaatagacaggccatagtcatgcctatttaaagaaaacatttttacagttagaaaaatatgcccattttatgaaggtataatttcttaagtttgcattcacttatgagggagtgacttaggtggatcagcaccttatccaagaagggattgaagaatgaatgaaattaaattcatattggagtagtagcctctattatacctggttcaactttctataaaaatactcaagaagatatatgccaaaaagaagtcgctgccactaaaaatttgtttttatagtcaagctagtcttgattcttgtagagaattctactaatgagatgtttggtggaactagaatgaacaatttcaacaggtgattcccttatgctgtggccaaacagagggaagacctttaatcatttggctgctatctttcccctgcttcagaaacatgcaaacgctaatcagaaaagtgaacaagaattactatgcatgtaagtacttttgtgaagcatcacttttaatgaagacatcttttgcatatgcatgtgaagaatgcaaatagtggttactcaaataaatggtcatatattagttttctgtggctgctgtaataaattaacacaaactttgaggttcaaaatgacatagatttattattttacagtttgggaggtcagaagtttgaaatagatggatattagtgggctaagatgttaggctgaattcctttctgaggtctctaagggaaaatgtgtttccttgtccttcctaccttccagaagctgcctgcattccttagcttgtggccccctttcatcttcaatatcagcaatggccagtcaactctttttcctattgcattgctctgactattctacttctgtttttgagatttaatgacccttgtgattacattggtcccaccctggtactggaggataatctccctgttttaaggtcagacgattagcaaacttaattctatctgctaccttaattttcctttgccatgtaatctaacacattcacagattttagggactaggatgtagacacctttggaaggccattatcctgcttactaaatagggcagtaatatttttggaaatatgtttgtcaggatctgtcacagttaaagcactatatctatgctgaaactacgagggccttggggattgttgtttttcataatacagatgcaggtagtgatacaagatgagtctatgccaatcccaacaggtatgctaggtggaaaacctgctagaggatggaaattaggatataagttttgtaaaccaacatgtcatttagctgtaagagatttatgtttaagtgacacataaagacaatcttcatctttttcttggcaaacacggtctctttcatgataaactaaagtaaaaagaaatcattatggacaaggaaaagggaacagtatctcagagactcagagtaaatgttgacctcccaagatgatatgtcacagaaatctgaagggattttttgtcatcctcaacagcatcaggaaacagaaagtgaaatgagagaataagtttagattgtaaaaagtaggattatttggaaaaggagatggattagtcaagaaaatattgtaaagagaccagaatgtcataacacaattgaagtctgtgttggaagctgaaaagaaatcactatttaaaaaacactcatggccaggtgtggtacctcaagcctgtaatctcagcactttgggagacaatgcaggcagattgctcaagcccaggagtttgagaccagcctgggcaacatgtaaacctgtcacttcaaaaaaggcaaaaattagccaggtgtggtggcacacacctgcagtcccagctacttaggaggctgaggtgggtagatcacctgagcctggggaggtggaggctacagtgagctgtggctgtgccattgccctccagcctggatgacagagaccctgtctcaagaaaaaaaaaaagaagaaaaagaaaaaatcaagaggggaaaaaaattgataatttctgttgaaatgaacaggtgcaataaaaattaaaataacaaaagagatgattaaaaatatagaaaatagagatcatagatttgaacacccagaaccaaagtaagaatcacagatgttcttgaggcagaagcaattagaacacaaatagtagtgaaagattaataaaagctcttcggagcacaacgaacaaacaaaaacaaaacccgataccaaaaaacaaaaattgaagggactttccgtactccaggcaacattaatgaaaagggttttatatcatttcaacttggtaattttttaaagaataaagtaaaaaaaatccttcacacacacaggcaaacaaaacagttagccttataaaggagcaaaaaatcagatattttttttttggccacactatatggtacaaaatattgctataaaacctactgcttagaacagttaggactctggatgaactgtagcaatctgtgcattaacagtctctctaggagattcttaaacatactaacatttaggaagcactgcccaggtaactgagagagaaattgaagttaagaattcagtaacagagacttcacagatggtgctgccactgggagccccgtattaccagctatggtcaaccccactgttttcttcgacattgctgtcaatagcgagcccttgggctgcgtctccttcgagctgtttgcagacaagcttccaaagacagcagaaaattttcatgctctgagcactggagaaaaaggatttgattatgagggttactgctttcacagaattattccagggtttgtatgtcagggtggtgacttcacatgccataatggcactggtagcaagtccatctacagggagaaatttgatgacgagaacttcatcctgaagcatacaggtcctggcatcctgtccatggcaaatgctggacccaacgcaaatggttcccagtttttcatgtgccctgccaagaccaagtggttggatggcaagcaagtggtctttggcagggtgaaagaaggcatggatattgtggaggccatggagcgctttgtgttcaggaatggcaagactagcaagaaggtcactattgctgactgtggacagctctaataagtttgacttgtgttttatcttaaccaccagaccatttcttctgttgctcaggggagcacccctccaccccatttgctcgcagtatcctagaatctttgtgctttcactgcagttccctttgggttccatgttttccttgttcccttccatgcctagctggattgcagagttaagtttatgattatgaaataaaaactaaataacaaccacaacagcaacaaaagaattcagtaacagagaagtggctggttgttaataattaaaccaagttaacaaaaagtgagatttaagtgattgtaactttaattataatactgaatgcaaatgtaaaactatgcttttgaaagagaaaatatgtcacacaaaataatgctttaataagcattaaatatttaataccttaatatttaacactaagcaataagaaacccaggatcatatttacaaggtccagaaataaatttgtgacaaattctcatttttctaggggtagactcaaatattctaaatatttgaaagttttaaaatgtattcgttcaacaaatattaatattctttttgatataccaggtgccactattagaaacaaaagtaggatgcatgacttccaaaccaatggagagagaaaagaatgtgcagcctgatctaaatcaccaagtactgtcgtcccttggtatctgtgaaggattgcttccagataccaaaatttgtggatgctcaagtccctggaataaaatggcataatatttgcatgtaacctacagactactttaaattatctctagactacttataatacctaatgcagtgtaaatgctatataaatagttgtattgtttagggaataatgacaataaaatgtctgtacatattcagtatagatgccatttttttttcctgagtgtattagtcctttttactgctgctgataaagacatacctgagactgggcaattcacaaacaaagacgtttatttgacttgcagttccacgtggctggggaggcctcacaatcatggcagaaggtgaaaggcaaggaggagcaagtcacatcttatgtggatggcagcaggcaaaaagagagagcttgtgcagggaaactcctgtttttaaaaccatcagatcttgtgagacttattcactatcaggagaacagcatgagaaagacccaccccccatgattcaattgtcttccaccaagtccctcctacaacacaagggaattatgggagctacaagatgagatttgggtggggacacagagccacaccatatcactgagcattttcaatccatgattggttgaatccacagatgtggaacccacagacaaggagggccaatagtatataaaacaaagaaaaaagagtaaagcataaactacacaaagcatgaaataagattacagtgttacaaacatatcatttacggcaataaaaataaatagtataaagtcccccagtggaagaaaaattagataatttgaccatggccggacacaggggcttacacctgtaatcccagcactttgggaggctgaggtgggtggatcacctggggccaggagtttgagaccagcctggccaatatggagaaaccccaactctactaaaaatacaaaaattagcctggccttgtggtgagtgcctgtaatcccagctactcaagaggctgaggcgggagaatcacttgaacccaggaggtgaagggtgcagtgagctgagattgcaccattgcattccagccggggcagtaagagcgaaactctgtctaaaaaaaaaaacaaaaaaaaaaacacaaaacataatttgaccaaatagtctatctgaatattgatgttcagcaaggggatagtatatgtttgtaaaaagccattttcttagtattatcatcctttggttaagtcttgccactgccatatattacctgaatgaccttgggaaatgcatctaacctatctggctttgaatttccttatgcataacataggaatgacatttcccctgtacctgatatgttgaaaagaggaaatataaatgtgaaagcattgtgtaaagctgaatctcattgtgaaatgtttattaaactagtctattaaaatacaacaactgtatatttcagctaaaaagcaaaatctaactgtagggtactgagaagaaatatacctaaaacaaagtaactcattagattaaaaaagaaagaacaatagaatggacaagatttattaggcagaagcgaaattaaaaaaaaaagtaatcttggcaatatttagatgaaatagaatcaaaggctataaaaatattaaatgcaatcaagaaggttatattttctttaagatagacttcacaatgaagataaggcagttctgaatttttattgacttggtaacagcctcaaaatacatgaaacaaaggctgttagaaatataaggaaaaattgatggaagtagaattgttgtatgacactttaatacacttttattgatctttcatgggtcaaataaacacagaattgatagaatattttaataatctaacaaagatgatttaataaatatttattaaattttgttctctagaaataagcaatacacttttttaaggagccatgaagcatttagaaaaaaattgatcatatattatatctcaaagaaaccatattaaattatgaaatataaagtgttaacagcctccatgttctgcctacactgaaatagagctagacattaatagcaaaagtttaaatgcaaaaatcagtagcttggaaaagagaaataatgataacaaaaaccaaatttttttctaaaaactccagattcaaacaggaaaggaaactatataataaactgttaggagagtaagaactctatgtatcaatattttaaatggctaaagctgtatttagcagaaaattaatagccctgagaactttcattattaaaggagagtaacaaaatcaatctgtggaaaataaaactaatgaattaataaatagagactccttttttttctgttaaataagaccaacaagcaaataatatttatttaatgagctagaaataggaggagcttacgcagcataatacaagatatttactggaaacctgtagcaaggtatgttatttaacgttaacgttgtaaatattactttcactgccacaaatgagatgagtgcttgtgatttttgtaaaagttaaatcccaaagaacaatttctgcttcccatgtagtctgtaaaccctcacaaaacacaaacagtagcaacaacaaaactctctgagggatctgaagaatgaacaaaggcagcaagattctcgaagggggttgaagacacctggaagtagtataggttaaatttcttatgactattatcctgaggtcaagccacaggtagggccacacagagtggctgaaactcctgtaggaagctcagtctttctggccttatgaaccaggggacagagtttggagcaaccccagctactggaaagtaagggaggaatgtcattaaaaagagggccagaaaaggagcattacaaatttttggtgtaaattctgctcaaatctctggctgacctttggaatatacatacacaggcagaccaaagcagtcagtgaatttgataatatcaatatagattttctctatgaagaacagagattgtatttttaaaaaggattaaaaaaaaagcaaccagagcctcaggttcctatgggataattcttttaacatatgagtaattggttccccagaaggaaaggtgatagagaatgggtcataaaaatattaggttggtgcaaaagtaatcgtggttttgcaattacttttcattacaaaacccacaattacttttgtgccaacctaatatttgaagaaacagtggccccacacacttcccaaaattggtgagagataaatgtacacgttcaagatgctgaggcacattgtaatcaaactgctgaaaacccaagacactatcttgaaaatagccggagaaaaacaacacactatatacatgaaactgcactgctaaatactgccaacctaccttcaaaaactatgaaagcaagaagacaatgaaacaatatcttcaatgtgctgtaaggagataagactatccaatcccgaagtccatatccaaagatactcatacttcaggaacggagtcaaaataaagttgcattcagaaaaacaaaaacagaatatttattgccagcagaccaacttacactgtaaaaaatgctttgttctttgggatgacaagaaaaaatagatgaaaactcagatccttatgtaaaaataaagaaatcataaatagtaagataaatataaaaatcaattttttcctcctaatgttttaagaatatgtatgtttgtttaagtaaaaactatagcatcatttttatgggatttataatacaggtagatgtaatttcaatgacaacttgaatttagagggagtttgtaaatagattcatacatgtgtgaggtttccatattgtatgtaaatagtataatagtaattctaggtagactgtaaaaagagaggttggattgaattcctggtaatatgtgtttaaatggaatgaatactcgttcttagaatgaagagaagtgtgcagaatggaactttgcaaacccttactggcccatatgtcacggggtggagatgtcaccattttctatatggctccagatcaagcaatctcttgacaaaaagcaagctggcttcgagtaaccttcaaacggagtgtaccaggccaatgcagaagacataacatggtttgctttctttctcccgtccattttagtatcttaagtaccagcagatagaaggtccagaaaaaagaaagaggatgatattgtaggggaggccaaattttctctcttagggttttttagctgggcctgaggattgaattgacataaggcagatcagcgggagaaaagcatacaaatttaattcattcaatttttatgtgagcacaagagccctcttaaggaaatgaaacccaaagacagagttgaaagttgaacacctatgtactgaattgggaaaggaatagaaaattgtgagtatgtgacaaagccaacgggcttgggctagggaggttaattgggtagagaagtaactaggaagataagggttactttaataaggtgtgtttgttcagatttctctcagcatcaacttctcgtctttgatgataagaacgctactttccctctggcgtagggaggacaagttatctcctgtttctaaggaaaagaagaaagctcagagtatattttttgtatctgctgtttttccaagtgtctttaagctcaaaatagtcaatatactagagcaacatattttggagtattgtgttctgaactccttcaatctttagcatttctcttctgtcattcttcaggctcttgagcacttttgagaaactaatatgaatgggaaagatgtaatatttactcccaggaaggttgctttggtgatctagtctgtgaactagactcaggaaactgtctgggtattggaaaggaagtcacggatgcgcaatggaatttgtaaaggggtggcacagctcttgaatactctccttggaagagaccctggcatggagagaacagagtattaacctcactctgaggttgggaagactaagggaatctgaggtgtgaggagggatggagacgacaggtcacacaatgtgatggaaaaccgcacatggagtggaaagaacatgaactctggagtctggaactcctatatctggacttgacaccgtattctgctatgtggccttcggtgagtgtgccaagtagaatattggctctgcaaacgtatccacatcaaatttctagagcttgtgaatgtgaccttgtttgcaaaaaaaatggtccttgcagatatgattaaattgaggatcttgagatgaggaaatcatcctggattattttgggagacctaaatgctattacaagagtcccaccaaccaccagaagctgaaagtggcaaggaatggaatccctcctagagcctctggagggatctttgctcttaaacatcttaattttgggcttctggcttccagagctgtgagagccacaaagtttgtggttattttttattgcagccacagtgaagaagataataaagccagctactgacctctctgaatctcagtgccctcatctgtaagatagaatcagctagctactttatagcatttttccaggattaaatgagacatgtaaaatagaaaacaaacaaacaagcaaacaaagaaaagataaggaacatgctgagaaaaaaatatagacaccccttgtttgatgttactaattgattcctgatgatcagatgtattacccaaaaatgatttccttgagacagtttgccattacttaaatgggaaaaaatgtgttatatgtcaaaccaaccctctagtgaatttcttgaagtgtaagtaaaacacagtaaaataaccatagtagaacaataatgtcacactgagacttaaaatgcaggcatacctatatctcagagatactgcatgttcacttccagaccatcacaataaagtgaatattgcaataaaacaaggcacacaaacttttttgtttcccagtgaatataaaagttatgtttacagtctatagtagtctagtatgcaatagcattataaaaaaaatatgttatcttaatttaaaaattttttttgctaaaaatactggtgatcatttgagccttcagtaagtcataatctttctgctggtggagggtcttgccttgatatttatggctgccgactgatcagactggtggttgttgagggcagaagtggctgtggcaatttgttaaagtaagaaaacagtaaagttttcaacatcagtggcttcttgctttcacgaatgacttctctgttgcatacagcactgtttgccagcattttacccacaataaaactcctttcaaaatgagtgaatcctctccaacccttctttatcaactaagtttatgtaatattctaaagcttttgttgtcatttcaacgatgttcataacatcttcttcaggagtagattttacctcaagaaatccttttctttgcttacccgtaagaagcaactcctcactcattcaagttttattgtaaaattacagtaattcagtcacatcttcaagctttacttctgattctagttgtcgctatttcttccacatcttcagctccttcctccactgaagtcttgaacccctcaaagtcatccatgagagttggaatcaacttctcccaaacaccttttcatgttaatattttgttgtcctcccataaatcatgaatgttctcaatgacatccagcatggtgaatcctttccagaaggttttcattttactttgcccagatcaatctgataaatcactatgtatagtcttacaaatgtatttcttaaataatgagacttgaaagtcaaaattactccttcacccatgggctgcagaatggatgctgtgttggcaggcatgaaaacaacattcatttccttttacatctccatcagaactcttgggtgaccaggtacattttcagtgagcagtaatattttgaaaggaatcttttttctgagcaataggtctcaagagagggcttaaaatattcagtaaaccatactataaacagatgtactgtcatctaggctttcctgtttcttttcagagaacatgaagagttggtgtagtatcattcttaagggccttagcattttcagaatggtcaatgagcattggcttcaacttaaagtcaccagctgcgttagcagctaacaaaagaatcagcctgttctttgaagatttgaagccaggtatcgacttctcctctctagctaggaaaatcctagatggcatcttcttccaacagagggctgtttcatctctcttgaaaatctgcctttggccgggtgtggtggcttacccctgtaatcccagcattgtgggaggccgaggcaggcaaataatgaggtcaggagttcgagaccagcctagccaacatggggaaaccatgtctctactaaaaatacaaaaaattagcagggcgtagtggtgggcacctgtaatcccaggtacttgggaggctgaggcaggagaattgcttgaacccgggaggcagaggttgcagtgagctgagatcgcaccattgcactccagccctagtgacagagtgagactatgtttcaaaaaaaaaaaaaaaatatgctgtttagtgtagccaccttcattagttatcttagctagatcttctggataacttgctgcagcatctatataagcacttcctgctttgccttttatgttctggagatggcttctctccttgaacctcatgaatcagcctctgctatcttcaaacttttcttctgcagcttctttacctcttttagccttcatagaattgaatatagttagggcctttctctggtttaagccttgggttaagggaatgttgtggctagtttgatcttctatccagaccactcaaactttcccatatcctcaacaagcctgtttcactttcttatcatttgtatgttcattggagtagcacttttaatttccttcaagaacttttcctttgcattcacaacttggctatttggtgcaagaggcctagctttcatcctagctcagcttttgacatgccttcctcgccaagcttaatcatttctaatttttgatctacagggagagacatgggactcttcctttcacttgaacacttagaagctgttgtctgcttattagttggactaatttcaatttgttgtgtctcagggaatagggaagcctgaggagagggaaaaatggctagtcagtgcagcagtcagaacacacaaacatttactgataaagttcaccatcttatattgggccccataacacttacaataggaacatctaagatcactgatcacagatcaccacaacagacataataataatgaattagtttgaaatattgggagaattaccaaattgtgatacatagacgtgaaatgaacacgtgctgttggaaaaatggtgccaatagacttgctagatgcaaagttgccacaaaccttcaacttgtaaaaccacattatctgtgaagtgcaatgaaacaaagtgcagtaaaacaaggtatgcctgtacttaaaaaaattatatcctcgatcacttgtacttaaaaaaattatatccttgatgacttctacaattaacatgttataaaatgtttgctttgtacgtagtagctattctcacttgttttgttttcttctctacaattgtcttcagtgttttctcaacagtttggggatttcaacaataagcaaaaaaagtaaaatggggaaggcactgggaaatgtgctctagtgcctggtggccaagtgtggctcacactgatggtatgatggccttttagcatcagcaacttctgaaatgggtgtttcgtgtgttgtcactcagcttgctttccaaaatatctatatattattctgatgttctactgaatatgttttgaaaatatcttgatgattttcctatatttccttttattgaaagttttgcagagtttggtattataaatctaaagttttgctacatgaacattggcaaaaaaaaaaaaaaatagatgatgaaatttggattttaaaaaccaagagtcattttaccatgaaaatgttaatcgaggcaacatcattcaggttatgcctgtatttgcagaatgtttcatagtagaaaattaatatgaaatataaaaagagttaatacaaacaagtaatcagaaataaaaatcaatagaaaaataactaaggggtctgaagaaacataaattggagaagcaacagaaatggacaattaatgaatgaaagaatgtacaactgcaaaagtaatcaggaaatgccttctaaaatcagcacagtatagctttttacatctatccaattgtcaaaattaaagggaaaaataaatctaacaattctaggtgttggagaggttgtaaagcaatgaagattatcattcacagagcaaactggtacagccactgtggaatatagtgtggcatcatccagaatagttgaagacatgcaactcccatggcccacatgccaaggggaatgtgcacaacatacttacaatagtatctttttgataattcaggaaaacgtacatgttcaccaatagctaatacataaatattattattcaactaagagacgattttcgaaaagcaaaaaaagaatgagtaaaaacaacatatagtaacaagaataactataaatatatgttgagtaaagatgttttgaaaatgagtttcagaagaatgcaatctaataccattatataacaatttaaaacatgcaaaaaaaaccccatcattttcagctagttggcaaatgtagtggaattgggcatggggatattctccctagaaaaagaattttttcatgttttttgatctagtaatctcatttatagaaatctttcttaaagaaatagagatgcaggcaaaaattcattattatactttggtattatagtatttatagaataattaagtactctaaattatctgtcagtaaactgtgaaattgttaaataaattatggaacataaggtagtgttttaaaatctttcaaaaattatatctaataatatgggaaaattgcattgctatgtaatccgaatttggtttaaaaattaaacaaatagcaaaaaaagaaggcaaatatataaataagactgggaactataaaaacactatcaatgtttatctctgagtgatagaataatatgtgatttttaaaaatgtttttctgtaattctcaaattaggtgcagtaagcagacatgacttctacaatcataacaggtagcttcattgacctgtttctaaaatgggtagcactttttaaggattgaagttgttttgtccagttggacagattcttatccctttgtcttttcttgtattgccaacttctgcctatacttgaaatagtagggcagatttctatatgtaagcatttaaagggtctgcaagaaatactaagccatgtaggaactgtgaatattaaatgagataatgaatgaaaagaagcctagcacagtccctagcccaagtaagtacctattattattattatcattgactttactacggctttggtgttatgtcacagacaaaagtttgcaaaccacttttttttttgcttgtttttttttttttaaggactcaaaacagttacctttgagtactaaagtccttaagatggaaaacgagatgatatttattatgccactgatatgtttcaggaagagcttgtggagagagcagacaaaacaaatggtaaatcttgttcttagaaagaaagagctatctgtccccattacagccagctgtcatgcccaggctggagccactcttgggacaaaattagggacacttgaaaatggtaaatcttggaaactgagagctctgtatttttcaacttaggatcataatctattaacccctatttctatcccagtttttctcttggataactgatttcatttgtgcaacttgcattgagaaggtcaggataaggcctggaaattgtcaaactctagattttgatgacattttggtaactccttacaggaaaatctatcagttacatggtccaattgtaggggtgatatttactaattttgcattctattgaacagcgatatataatggaatgtatgttgtgaatcttcaataagtgtttcttttctcttataacccaatgaattgacctctataataacatgcagttgctaaatgaaaaaagaattgtatttaagcagaaaaaagttttagaaaatgtgattttgtatgccaaaatatgcatattagtagcttttatgagaagtgtccttgaaggaaaatatggtgaatttgtatctggttcaggtcttcttttaataaccagaaaacaaggctgaaacaagcacaaggcagttctatctgtttgaatgatataaattggttgttaaaaataaaaataaaatgaaaatgaaaaccaagataacaataccaaggataagttaaacaaaaagttggttttttgaaaagatgaacaaaattgataagcctctggctgtactaaccaagaaaagatccaaataaaagtcagaaatgaaaaagaagacattacaaatgataccataggaatacaaaagatgatcagagactactatgaagaagtgtacactcacaatctagataatgtagaggaaattgacaaattcttgtaaacatatgactgcccaagattgaaccagaaagaaatagaaatcttaaacagaccaataatgaatagtaagattgaatcaataattttaaaaccttccccctaaaatgcccaggactggatggcttcatagccaaattctacaaaatgtgcaaagaagaactgatactcatcctactgaaactcttccaaaaaaatcaagatgattaaataaagaaaatgtgctctgtgtgtgtatataagtgtatacatatgtatatatatacacacacacacatacacatatacatatgtatacacatatatacacacacaccacatgtatatacatatacacatatatacatacagcacattttatttatgtatatgtgtgtgtatatatgtatacataatagaatactattcagccacagaaaatgaatgaaaacatgtcttttacaacaacatggatggaataggaggccattatcttaagtgaaaaaactcagaaacatagtgaaataccacatgtcctcacacgtgggagctgaataatgtgtgtatgtagacatagagtatagaataatagtcactggagactcagaatgatgatagggtgggaggggagtgaggtagtacaatgtacactatttaggtgttgattacattaaaagcccagacttgaccactatgcggtatatccatataacaaaactgcacttgtacccctttaatttacgtaattaaaaaattggctgggcacagtggctcatgcctgtaatccaaacactttgggaggcccaggcgggcagatcaattgagcccaggagttggagactagcctgggcaacatggcaaaacaccacctctaccaaaaaaatacaaaaattagctgggcatggtgccacatgcctgtaatcccagctactatggaggctcaggtgagaggatcccttgaacccaggaggcggaagttgtagtgagccaagatggcgccacggcattccagcctaggtgacattatgagaccctgtctcaaaaacaacaataacaacaataacaacaaaagaaaaaattatgctcactaaaagaaaaaaacagtaattaaaaaaaatgagttcttgtggtgaaacataatggcacctcctggttccttcttgcatttgaagattatagatgaggattttcagggaatggtcaagatcaaaacctatttggtctcccaagattttccaggagaggctgtaggcctcttcctagcttacctggcatgtacatactaactgcaggtagcagctgtatgaagttgttgggtaactcatttttggttgtgttctctaggtgacacattaggcatttttgtctacctttaagtcctccattctcacctctggtagagtgtaaactccataatgagagagactgcttctgacttgtccacctctgtaccctaatttaatgaaaacatgttgaacaaataaagaataaacctagtggtggtcccaatcatccacctgcccttccaaccatcgtcctttccagattgcagccttctatatcagaagtgtcagcctttgttttcttgctctgggaagtgatgatttaagttccacaccaccaaaggattgtcaaatacacacaacaaaaataaacttgagctaaaattgtgatctaatatgcagagagattgaaaaagctaagaaaataaattataccactttggccatgcagatacaggaaccatctggaagcatctcagcaacctgaaagggagcatctgatgcctcgaattgccctgtccgtcagctttagctgctattcccatttgcttctcttaaatgtatttaacttgggacaagttgggagccaccttctcttttctgaggtgatcttagaagattgatatacgtaagttgcagcttgtttggattgtttatctgtatttaaaggctctagccaggcattgtattttgctgttaagataaaatcaataaataaaaacttaaaaaagaaccagactaatccttgaacattcctaaacatatactctctcctgctttcaaaaaggaacactgcttaatgtttacttattgtagtcttctgagaatttgatttgctgtgattgcacctttattcaaaagtacagaacctaaaaatggtacaaagaaagtttatttcaaatcagatgcatttgcaagccagtgtcattaaaaaacatgctgttggtaggctgaggtcagagtctatcatagagacagatgtgatttattgcaaaagagagccgactactgcttaggtatcaggtgcaaccaatacataactaccaccaaggaagggctggttgtgatgacggtattggaagctggtgagtcagactcattacaattttcatgtaatctctaaacttccttgttaaactattttctactcttcgtaacttttgaaaagagagaatatgggagaacttgagcttcctctttctccttctctggcttcttttgttcccgggcagagacattagctagcagtcagatatctgagaacatggtaagagaaataagagcaggaagcctcggcaactcacttgataattatttttcatcatttagtagcaggtggtagaataaataggatcatttgtaaagttcaagtgttgatggtggtagtggagagagatactaaagcattttagttttcaagccacaatgaagtaactggtatcattcttgacctcatttcatgaataactataaaattagataaaatgtatgcggcaactgttttcagaaattggctaacaggcaatgcagggctgtgacccttgagacaaggtaaacccctgaggcaagccttgcattcaccttggctttctgcctaggggtgcattcactggactggctagtaaggaggtggggccaagcattacatgcttgtttcaatgaactgataaggcagagtttgtactttgttgctgctgaggggctggaattagcagagtagggtactgaataagagagatgcatgaggtagggcatgtggaggtagtgtacatggaggtttctttgcaggtcattgtctgaaggattgactatgtataagcagggcaagacaccatgaggcctagcagagagggttcactgtgggaccaagagccgaacaaagacactagtggttgcccagagatgggagacgttggaattcttagtctgagagggcagatttccctgagaacctgggcattcagttgaaaccccagaaaggccagcctcaggagtgagacctgtacactaccataaggctgtgttctacaactaaggacaaaattgaactagaccagttctaacaatgaaaggttcaagagaatattttagaaatgtaatttcctgccagaaaaaaactcagtaccctataaggaagacaatataatgcagattccctaaatgtgtcgccctgtgtttagcatacaacaaaaaaattactggacgtgtgaagaggaagctccattaatcagaaaaaagcaataaatagaaacagactttgaaataactcagacattagaattagaaaatgaggaatttaaaataactagataagtatattcaaggacttgacataaaatgggtgacataaaatgaagaggcgggaaatctcagagaaacaaatgtaaactataataaagaaacaagtctatattatagaactgcaaataataatttccaaaatgaaaagtttactgaatggccttagcaacatattagaaactacagaaaagatcaggaaactttaagacagatcagtagaaattgtctgatctgaagaacaggaggaaaaaatagaaaaaatatatgaatcttcagtgatctgtggggcaaaagcgagaagtctaacatttgtacaatttgaggtccagaaatgaggatagagagaatgagggaggaaaaaaaatagtttaaaaaaatgaacaaattttcccaaatatagtgaaaaaatcaaactacaggttgaagatgtttagcaaaccaaagcaggataaaaacaaagaaaaccatacctggatgtatgacggccaactgataaaaatccaaaagtaaagaaaaaagctgctgaggatgggaggagtggagagacattacatataggagaacaacagtaagagttattttagactcctaaataaaaactattcaagccagaagacaatagaatgacatttttaaattctttttttaaatttaaatttattttattttaaattctgggaaacgtgtgcaggatgtgtagctttgttacatatgtaaacatttgccatggtggtttgctgtacctatcaaaccatcacctaggtattaagccacacatgcattagctatttatcctgatgctctccctcccaccgctgccccccatcccaccccagacaggccccagtgtgtgttgtttccctccctgtggccatgtgttctcattggtcagctcccacttatgagtgagaacatgcagtgtttggttttctgttcctgtgttagcttgttgaggatgatctcttccagctctatccatgcccctgcaaaggacatgatctaattcctttttatggctgcataaacaaaacctaagttttagataaacaaaacctaagaaaatgtactgctagtcaacccgcattataagaaatgttaaagcaaattcttcagcctaaaagaaagtgaaagcaaatggaaacagattaacaggaaggaatgaggagcacagaaatggtaaatatatggaataatatatatatttttaaactgtctttattttctgttaagctcttacggggtaacttactatttaaagcaaaactcatgacaatgtattgaaaggattataatgcaaatagaagtaaaacatgtgacagcataatggacaaggaagtaataaatgtcaggttcttatattttacatgagatagtataatattaattttaggtagattttgataagataaggatgcatattgttagtcctagagcatgcacgcacacacacacacacacacacacacacacacacacacacacatgctacaaagaggtataattaaaaaccctaatagtggtataaagatggaaactttagaaatatgcattttaacagaaagaaggcaagaaagaaggaagaaggaaacaaaaaaagatggcataaatattcagatggtagacttaaaactgaattatatcattacattaaatataaatggactaaatgtcccaattaatagtcatagattgtcaatatggatactgtcaggcctctgagcccaagccaagccatcgcatcccctgtgacttgcacgtatacgcccagatggcccgaagtaactgaagaatcacaaaagaagtgaatatgccctgcctcaccttaactgatgacattccatcacaaaagaagtgtaaatggctggtccttgccttaagtgatgacattaccttgtgaaagtccttttcctagctcatcctggctcaaaaagcacccccactgagcaccttgcgacccccactcctgccagccagagaacaaaccccctttgactgtaattttcctttacctacccaaatcctataaaatggccccacccttatctcccttcgctgactctctttttggactcagcccgcctgcacccaggtgaaataaacagccatgttgctcacacaaagcctgtttggtggtctcttcacacggacgtgcatgaaagatacaaaataaataaaacccaataatatgctgactacaacatatgcactttaaatacaaaaacacaaagagttaaaagtaaaaggaatacaaatatatgttatagaaataatttttagaaagccaatgtggctacatcaattacacaaagtaaactttaagacaagaaggtttaccaaagataaagagggacatatcataatgataaaggggtcaattaagaacaaataataattccaatttttttttcaagacagagttttgctcttgttgcccaggatggagtgcaatggcatggtctcagctccctgcaatcttcttctcctggtttcaagtgattctgctgcctcagcctgccaagtagctgggattacaggtgcctgccactacacccggctaatttttgtgttttttttttttttttagtagagatggggtttcaccatgttggtcaggctggtcacgaactcctgacctcagctgatccacttgcctcagcctcccaaaatgctgggattacaggcatgagccactgcacccggccaataattctaaatgtttactcaactaaaactttaagaactttcagatataggaatcaagagcgggatttttttttcaatattgtattatgaaaaaattaaacgtatatgaaaactgaagtaattttatagtgaacaccctgtgtaaccaccgcttggtgtctaacattaacattctactgtgtttattatattacatttgtacctatctgttaccccttctttctatttgtcaattcatcagctgcagtgattttgaaactctactctgtaaagttccaggaattgtgtgtgtgtgtgtatgtgtgtattttggaagtggggtagtgttttgagaacactagtagtcctcatttgaccaaataatttatacttttatctattattctatcttatatattggacttctgtttaggttacctgaaaacatggttttgtgagtaaaggaaaattttgaaagcttttatcaagggtattctgagggtaatccactctcccaatctagttaagcataatctagaaacctgaccatgtgttccttgaagacactgagtgagtgtacccaatttggcagcttttgtgagagcaaggaccatccttcatttttaattcccttcaggttcatgcctacagtgaaaagtcagtacatcttgctggatgaatgaaggtgggcaatgtatttattctatataatattgtattttgtgggcacacctgtgagaatatgacacaggttggacagttctacctggctcttagctatgttaattaccaactaattatgaggttgttttattttcagaaccccgttaagtccatttattaattagaataagactataaattccctctgtttaatccaaatttcactatctggcatcccccaaatcagaaatgttaacactggaacattgcttgctttcaaattaaataggtaagatttgaagagaactttggagtttaagaggttacatctaatgtgttctaaatattaggactcgtttttcttctgattacacccctacaaagtgccaagcctttgatagctcattttgtgttttctgaagttctagttctcctggtcacattctccagcaaggccctgtgtattaagtgtaaccagtaatggaaaatcctctacatagaatgtactcagaaaatttgaggagcttaagcacttgacttctctttggaaacacagtggatatttgtgtcgctactgtacacaaaggaggagacactgagaaataaagaaggttatcccaagtccccagtaaaacaggatgaggtttttaggtttgaggaaagtgcctcattcactccattcctgcctcaggatactgaaaggcaggtttctaggctgagttttctactgtaggaaatcctattttttacttatcaagaatgcattagagttggaagaattacagtcttcctacaccatatgctaatgttaattccagctggattaaagcaataaataaatgtataaaatcaatcattagaaacccagaatagaaatgagtatttatccctactggagtgagaggggacttcataaacttgaagacaaagagaaagatcgtttctgaaaagagtaatagatttgactccattaaaaattaaaacttctgtttgccaaaaagcaaatccacacagtgataagtatgtgccacagatatgagggacaagtgactaggaatcttaaaagaccaagccaattgataacaatgcatgattacaatggttaaatgggaggtcaggcatccattgttttcctgcctaatgctgttattttcaattctttcttgctcagtgggagaactcaattgcccagggtctcttcctgcttgcttttctatcattcctatttctgagccccagcaggggcctggtcttacattccatggcattccctgcctgaggccttctagctctcacatgcaatcttcagtgatgttttcgtgaggtctatttggggattcccagcaatgttgttctgtgccatttgttattaggtatgggtgttttatgctcatctttcattggacaaatgattgttttatttctagaaaagaaaattcatcatgttcccctacttcctatcttggatgcttgaaacatacatgtatgtgtatgttagtgtgtatatatgtgtgtgtttgtgtgttcaaggttttaagctagaagcgggtaatggctttaggaagtaatggtggggaaatctgtcacagcattatcacatgttcccatctgctgaaagcagaaaaatgattgtgagattgtgatgaccagagggaagtgatgaccaagtgagcctatgttctgaaccaggtttctgtaaatcacattaagcaagtttctccctgttactcctatgtccatttgcaaggatgaacacttataagtcatgtttacattctaccaacaaccactcttttaacaggtaggtcttgttccattgtacagccccagagaaaatatgcatgaacattcattcatgtataagtacctttaaggaagaatctgctttgttcaaggcactgtaaaatacacaaagataaattaccaagatgtttcaaatccgtggatgtacacaaataattataataagatctaaaagggttaattgccaaaaaatgaatggaaatatgcaattaaaatataataaacagatttctggtccagaaaagatgatgtagacccattttcccctgctttttcctgctaagaacaactaccaactctggtaatggtacaagagacaaccaaatgagagcgctgaaagacagtaagaatgagctggtttgctcacgcctgtaagcccagcactttgggaggccgaggcaggtggatcatgaggtcaggagagcgagaccatcctggctaacacggtggaaccccgtctctactaaaaatacaaaaacaaaattagccaggcgtagtggtgggcacttgtagtcccagctacttgggaggctgaggcaggagaatggcgtgaacctgggaggcggagcttgcagtgagaagcgatcgtgccactgcactccagcctgggcgacagagcgagattccgtctcaaaaaaaaaaaaaaaaaaaaaagaatgagctggcctccctaggcctggaggaacagcacagtagcagagtgtttagagtgtcccaacccaacagaagatggtcacctagaccgagtgtttcctaactgagtgtttcctaactccaagcctggcaacaagaagcagctcagggagactgattttttttttttttttttttttttttcctgattgagcggatgtccctctggaactatcagacaagttcaacgctaccagccaaagagattaattggaagcctcgccaaaaataattggccagaggaaggactctgctctccctcagccctgagactctccctttccaccaagaaatactgaagtgggcaggcagaacacgtaaaaaaagaatgaactatagcaaataatactgtcagggaagcctctttttctctgtgtgcctcaaatgatcctcccctgtctagagtcactggagcaagaagacataaccagcaacaaggatgcaaccacaaaaagtggccaattctaggaagcctctttgttctcacatgcctgagactctccttccctgcccaaagacactgaggcagatggcagaccccaccgtattcctctcccactgagagatacctgaggcccagtgtggggaaatctgttctgccccacaaggcagtggggtagaggcaggaaccagtggcctcttgcaaccagattaatcaagcagaacaaaataacacctcaaagtctgtgaaaattagagtgccactggagccacagctgataaaagtagccaagacccacatgattaatttaacagggttactgactgttacaacgaaagacttaaataggacctagtctctcctatcataataggcaaaatgcccaggattcaataaaaaattatccttcataccaagaaccaagaaaatcacaaattgaatgagaaaagacaatcaactgacacaaacaccaagatgaatcagatattggaattatctgacaataattttaaagcatctgtcatataaatgacctataaagcagctgcaaatttttgatacaattttttaaaatagaaaatattagaaaagaaatagaagttataaaacaactgaataaaaattctagaaataaaaaataacagaaataaaaatagtgctggatagtattaacgataggttagactatctactgttaattagagataagagagggtagaattactaaatttgaggacaaaacaatggaatccacccaatcagagcaatagaccaaaaatagactgaaaaaatgaacaggaccccagagatctgtgagacaatgacaaatggcccaacattcatgtcattggagtcccagaagaggataaagataatgggactgaaagagtatttgattagctgacagccagacatggtggctcatgcctgtaatctcagcattttgggaggctgaggtggccatattgcttgagctcaggagttcaagaccagcctaggcaaaatggtaaaaccctgtctctaccaaaaaaaaaaaaaaaaaaaaaaaaaaaattaaccaggcatggtggtgcacacctgtagtcccagctactcaggaggctgaggtgagaggattggttgagcccaggaggcagaggttgcagtgagccttgattatgtcactgccctgtataataaagtgagactctgtctcaaaaaaaaaaaaaaaagaaaagaaaagaaaaaagaaaaagataaattgggcatggtgatgcacacctgtggtcccagctactcaggaggctgaggcaggaggatttcttgcacctatgaggtcaaggctgcatgcagtgagctgtgattgtgccactatactccagcctgggtgatagagggagatcctgtctcaaacaaacaaataaacacgagtatttgaagaaatgatgactgaaaacttaactaatttggtgaaagacagaaacctacagcttcaagaagctgaatgaaccccacacgtaatcccaatgaaatctgtgctatgatatatcataattaatcttttaaaaataaaatatactgaagaaatcttgaaagcagtaagagaaatgacacattacctatagaggaataccaattcaaatgacagcagatttctcataaaatggagatgagaaggaaatgccacaatatttttcaagtactgaaagaattatcaactgtaaattctatgtctggaaaaactatacttccagagtgaagaggaaataaaaacattctcagatgaaggaaaagtaaatgaatttgttgctagcagacctactcttaaagattggctaaagaaagttctttaaacagaaaggaaacaatacaagatgaaatcttagaggattaggaaggaagaaagaacattggaaagacatttgtgggtacatacaataaactgttcttttctctttgagttttataaatcatgtttgatgattaaaacaaaaattataataccatctgatactcaattcaatgttattgaaaaatgggaaggacaagagatttaaatgggagtgaagtttcaaactagttaaatgttgataatgtagcctgtaacaagtcacatattaggttttagtactcagggaaaccacagtgaaaactatacaaagaagtacttcccaaaacactgtatatcaaaatgaaatcctaaaaaatgtttaggttacacacaggaaggcaagaaaagagaaacagaggaatgagaaccagaggaatcaaatagaaaacaagtaatgaaatggtatagtgaaatgctaacttatcaatagttaccttgaaggtaaatcatctaaacaccatcaaaagacagagataaacaaagtgcataatagaacataatctaactgtatgctgcctacaagaaactcacttcaaattctatgattagttaagttgaaagtaaaagggtggaaaaacatatatcatacaaatattaattttaaaaaaaacaggagtgcttatactagtatctgataaaagtggactttggaacaaagaaaatatctggaaacaagaaggaacattatataatgataaaagaatggatccacctggaagacaaaatgatcttatgtacataccaaataacagagcctcaaaatacacaaagcaaaaactgatagaactgaaagagaaacaaataaatcatcaattatatttcaggacttcaatgtcctctctcaacaacaaatagaactactatacagaaaatcatcaagaatatagaagattgcgccatcacaatcagcaaatagaatctaattgaaatatatagaatactccatccaacaacagcagaatatactttttatctcaagcaaccgaagaacattcaccaaaatagatcatatcataggccataaaaaatgcttagcaaatttttacagaatgtgttatccataacaaaaaaatagcagaaaaatctctaaaacatgaaaatttataacacacttctaagttatcaacaggtcaaagagtaagtctttaaaggcctcacatcaataacctaagttcctattttgagaaacgagaaaaataaagtaaaagcaagtagacagaggaaataataaggataaaagaataaatcaatggaattaaaaataagaaaaaggtagtcaatgagacaaagaacaggttcttctaaaaaattaatacaattgataaactactagcaaaattgacaataacaaaattaccaataccaggaaggaaataggaaatataaatacagatcctgtggtcactaaaacacaataaaaatactatgaacaactttacactcatatattcaacgaacatagaagaaatagaccaatttctaaaaaaaaaaaaaaaactagctaaactcagccaacatgaaatgaacagccctagcctagtcctatagctatttaaaaaattgaattaataattaaaaatatcccaaaaaagaaatctctaggactacattgtttcactggagaattataccaaatgttaaaaaaaaataatgccaattttatattatcttttctagaaaatagaagaggcaggaacacttttcaactcattattaccctgataccaaaaccaggcaaagaagaagaaggaggaagaggaagaagggggagggaggaaagaagactatagttcaatgtcttttgtaaattttgactcagaaattcttaatgaaataatagcaaagaataaaaagaattatgtaatatgatgaagtaggatttattatatgccaggtatgtaaggttggttcaacattttaaaattaattaatgtaatataccatagaaataagctacagaagaaaattcattgaggaaacactggaagaaattaaaaataaaaaaagtaaataatatcatcatataaaaaggcgtctgacaaaatccaacatctatttataataaaaattctcagcaatttagaaatagtgatgaattatctcgacttgctaaagagcatccctgagattagaaacaaggccaggaggttcactctcatgacttttattcaaccagtactggaaagtctagccaaaacaataaggcaagaaaagaaaatagaaggcatgcagtttggaaataaatgaaataaatctctctttgtagatgatatgattgtctacatatataatccctagaaatctacaacaacaaaaatcctagaacaagtgagttcagcaagggtgcaggatgcatacaacagttaatcgtatttttacatgctaacaaagaatgtgtaggaaccaatatcaaaaacagtgtatcaattacaatagttccaaagaaaataaaagattcaggtatacacttaataaaacaggtacagaggccgggtgcagtggctcatgcctgtaatccctgcactttgagaggctgaggtcaagagtttgagaccagcctggccaacatgatgaaaccccctctcttgtaaaaatacaaaaaattagccgggcatggtggtgggtgcctgtaatcccagctactcaggagcctgaggctggagaatcacttgaacctaggagatggaggttgcagtgagccgagattgcaccactgcactccagcctgggcaacaagagtgaaattccgtctcagaaataaataaataaataagtaaataaaaacaggtacagagtttatataatgaaattacaaaatgctgatgaaagaaattaaagacttaaatgagtagagacttggaaggctcagcatggtaaagatgtcagttctgcccaaattgatctttgagaaattaaatttctaacaaaattctagcaaacttatttgatctccatttatatggaaatgcacaggacctacaatagctaaaacaatgttgacataaaataaagtgggaagaatcaaccaacccaacattaaagagatatatatctccacccaatattagggctatatagctatagtaatcaaaccaacatggttttggcagaagaatatacaaaatggaacagaatagaggacccagaaatagacttccataaataggctcaaatgatttttgacaaagatgcaaaagcaacttaatgaaggaagtccagcctttcaacaaatgatgctagagcattagacatccattgggaaaaaaaatgaacattgatctaaatctcataccttcatacaaaaattaactcaaagtggatcatagaattaaatgtaaaataataacaattttaaaaaataaatgtgggagaaaatctctgtatgtaaggcaaggcaaaatgttcttatataaaatagttagaaatatacctaaccaaggaggtgaaagaccactacaaggaaaactacaaaacactacttaaggaaatcatagatgacgcaaacaaatggaaacatatcccatgttcagggatggatagaatcaatattgtgaaaatgcctatattgcctaaagaaatctttttctttcaaattcaagtcaattttcatcaaaataccaccatcattcttcatagaactagaaaaaaacaatccaaaaattcatatggaaccaaaaaagagcccacaaagccaaagcaagactaagcaaaaagaacaaatctggaggcatctcattacccaacttcaaactatactataagaccatagtcaccaaaacagcatggtactggtataaacataggcacggagacgaatggagcagaatagagaacccagaaataaagccaaatacttacagccaaccaatcgtcaacaaagcaaacaaaaacacaaagtggggaacagacaccctattccacaaatggtgctgggataactggcaagccacatgtagaagaatgaaactggatcctcatctctcactttgcacaaaaatcaactcaagatggttcaaagacttaaatctaagacctgaaaccatacaatttctagaagataacattggaaaactcttctagatattggcttaggcaaagacttcatgactaagaaacgaaaagcaaaaacaaagataaatagatgggacttaattaaactaaaaagcttctgcacagcaaaagaaacagtcagtaaacagacaacccacagagtgggagaaaatcttcaccatttatacatctgacagaggaccaatatccagaatctataaggaactcaaacaaattagcaagaaaaaaaacaaacaatcccatcaaaaactgggctaaagacatgaatagacaattgtcagaagaagatatacaaataaccaacaaacatatgaaaaactgcttgacctcactaattattaggaacatgcgagtcaaaaccacaatgtaatactaccttacagctgcaagaatggccataatcaaaaaatcaaaaaataatagatgttggtggggatgtggtgaaaaggaacacttttacactgctggtgggaatgtaaattagtgcagccactatggaaaacagcgtggagattccttaaagcactaaaagtaaaactaccatttgatccaacaatcccactattgggtatctacccagaggaaaataagctattatacaaaaaagatacttgcacacacatgtttatagcagcacaatttccaattgcaaaactatggaaccatcccaaatgcccaacagttaatgagtggataaagaaattgtggaacatatataccatggaatactattcagccgtaaaaaagaaatgaaataatgatattcacagttacatgggtggaattggagatcattattctaagtagagtaactcaggaatggaaaagcaaatattctatgttctcactcataagtgggagctaagctatgaggatgcaaaggcataagaatgatacaatggactttggagattcaagtgagggaggagggaggtgaaggatgagagacgacaaattgggtacagtgtatactgtttgggtattgggtgcaccaaaatctcagaaaccatggctaaagaacctattcatgtaaccaaacaccacctatttttccaaaacctatagaaataaaaaataaaaataaaaaaacaaaccaaagtgtccttagatttaacaccaaaggcataatccacaaaaggagaattgctagattcaacttcatcaacattaaaacttttgctttgtgaaagcccaactacaaggaatgaaaagtcaatttacaggctggttggaaatatctgcaaaccacatattacacaaagaactagtatttacaatatataaagaactctgaaaagtcaagagtaaaaaaacccaaacagtccaattagaaaatgggcaaaaaacatgaagagacatttcactgaagagaatggcagatggcaaaaaaaaaaaaaaaaaaaaaaaaaaaaaaaagagcacaataaaagatattccacatcattagccatcagagaaatgcaaatataaaccataatgagatatcattacccatctattaaaatggctaaataaaaaaaattgataaggaggggattctgggaagatcaaaaagtagaaagcaccaggaatgtatctcctcacctagagaacaactgcatggcataatctgtctgatgtaactattttagaactctagagtctattgaaggcttttaatttccaagagaaggcttgggcagtaaattgcccttaactgtggttgactttagctcttagaataatatcagctactcataccccactcgcaggcatccttgcacagattccaggagtagcctgcacacagtttatgggagccagggtgtgcaaaaaggccactgtcattcaaaaatcaggaatctgttctctgatagctaattgttgcttctgattacaaaggtgcagacagagccaggggccattgttgttgcatttccttccattgttgcaagcccttctttctccagctgaagtgacttccaggggatttaaagggctagcactcttttccttttgttttcattttttttcttttccccttttgtgtttggagccagacattaaagactagtacattttaaagcagccacatatacatgggaaattagaaagtcaccgctcatacctagagaaagatgcaggctcacaaaagatgtgagaaggacttaactttacatctcaggcttatcctcagcacagagacaacctacaacaattcagaatgaaaaagcaaaccctggggaaggggaaggagaatctgattttcacagttatcacattattttatttcaatgtccggttttcaacaacaacaacaaaatcacagcacataaaaagaaacaggcaagtatggcacattcaaaggaaagaaaatgaaccaacaaggtctgtccctgaaaaagttataattgtggatctactagacaaagagtctaaaacaagtatcttaaagatgctcaaaaaactaaaagatatggaaaaagtaaaaaataaatgatgtatgaactaaccagcaacatcaatacagagatttagaaaaagtaaaaatagaacgagaaatttttcagttgaaaagtataataactgaaatgaaaaattcactggagatattcaaaggcatatttgaacaggtagaagaaagagtcagtaaacttgaagataggacaaggaaattatgagtcttaggaacagaaagaaaaaatattgaagaagaaggaacagagctgctggacaccatgaagcagaccaacatacccattgtgagagttcagaagcttaagaagagagagaaagaatagagagattatttggagacataatggccaaaagcttcccaaatctgatgcaagacataaacataaaaatccaagaagctcaatgaattccaaataggatgaactcaaagagatccaccccaagacacaagacacagtatactcaaactgttgaaagacaaagagagaatcttgaaaacaacatgagagaagcaactcattatgtagaaggaatcatcaatacgattatcagaattattgtcagaaatgtaggagtccagaatgcaatgggctgacatagtcaaagggctacagaaagaacaaaacaaaacaaaaaaaactgccaaccaagaatcctacattcagcaaattgtccttcaaaagtgagtaagaaattaaggcattctcatattaaaaaaaaaaaaaaagctgaggaagtttattaccactacacatgctctgtaagaaatgctaaaatgagttctacaggttgaaatgaaaggacactaatagtaacttgaatcttagttaagaaataaagttctccgtaaaggtaaaaatgtgggcaattataaaagctagtattattgtaataatgctttgttaactccattttttttctacatgatatgagactaatttttttaaattattagtctaaaagctagtattattgtaactttggtttgtaactccacattttgttttctacataatttgagaagctaatacatcttttaaaatatcagtttatattttagagcatattgcatgaagatgttaattttttgtcatcaataatttaaagaagtggggacagagaagtagaggagcaatgtttttgtatgttattaaagttaagctggtataattccaaattagaatcgataactttaggatattaaatataatccctgtggtaactacaaagaaaatagatatacacaaggggaaatgagaaaggaatttaaatgtttcactacaaaaaataaactaaccacacaagaagacagtgatgcaggaaatgagggacagaaaaaaactgtaaggtgtgtagaaaatcaatagcaaaatgggacagaaggaagtccctccttatcagttggccttaaaaaggaagtaaattctgacatatgctacaacatgattgaaacttgaggacattatgctaagtgaaataagacagtcacgcaaagacaaatactgtatgatttcatctatttgtggtgctttgagtattcaaaatcgtagagacagaaagtagaatggtggctaggggctgaggagaagtaggaattgagagttgttaaatggtatagagtttcagttttgcaagatgaagagttctggagatagataggtggtgatggttgtaacaatatgaatgtacttaatactactgaaatatacacttaaaattgttaagatgctaaattttatgttatgtatgttttaccacaaaaaaattggaaaaaaataataataacgccaaatgctggcaaggatgcagaaaaattggatcaggaaaattggatacattgttatgaaatgtacctaaaggcaggccatgtgattaaaccacctaagggatggtggtggatatggaatctgatcagatattgagggtaatccaatattgaagatgaagggttctggataaaccagtctaagaggattcttgctaaaattgggcaatacagagaaagacacagaagtccaaaagttaaggcctgattagggagagaatcagaggagcctgattaacgtttggtcaaggagagactcttggtcaatagcagtactttcactgtacacagatggtacataatacatatttattgaatggataagtgacttaccatcatttcaccactagatgattcctttagtcattgactatctgccagacacctaagtttgcaaaatgagaaatcaaaggacccaggacaaggagctcattttgccttagtgcagcattgacaacctcccatttgaggtcagtgtttcccaagggggatctattggcattctgggcaggaaaagtcttcgctctgtggtgctaacacactacagaacttttagcaacattttgagaactctccaaatgtcagttttgccctccaattgctgagacatcaaagaaatgtcctcacctcctccatttcctagtgcctcctagggatactggttgagaatcagcactttgtctctttctaattattatagccccaagagaacttaaggataaacataattcatgagctacatttcatatcctcccgtggcatggttgcatgtatgttataaaaagaaataggacttccttgccttctgagtggctctaagtttgagtttgaatttgtctaaagtattcatttggcttttatttgtcctggatgtttttttttgtgtggacataaaaaaattccctttcagaaaaatgctgctgagcacataccatatagcactctgcaaaccacctctttcaatctcaatagaagaaaaatatttgaaagggaaaagtattactggattatttttgtcaatgtgcaaaatctcttgaaaggacaattttctcttgttgactagcagaaacacagcagtgttaattaagttgccttgttaaatctgaaagaatgtacatagttaacgttggaaacccttctaattgcctttgtggaaaggcatcaaagggatctacaagcatcttgtttagagaagtgctgaggcttgagcttgggccaatgggacctttgggaaaaactcctggggaggtggagggtggagaaagccagaattatcatttcacgtattgagcgcttgacaagtttgtttccttttcctccattccctttggagagaggaggaggatgtgcgtttgaatggagagtctgtagaggtgccccaattcatttgggtgcgggcgtcctcatacttgctatcttggcccatggtagcaggttagccttctagctgtgggaagaggaaaaacaaatcttgcccccagtaatagagttctttcaaaagaccccaggcaaagtatgcagcttatatagaaaacaataaacacaaaatgatgatttgcattaaaaaatgaaaacactgttgctttcccataaatctagttctgggataggaatttggggtgaagagagagccccagaagtgtagaagaatgacatttgaggtaacaacaggagttcagaggtcctgcttttgtacccttcttgagtttcagatgagataaaaccagcagctctgctaagatgcagtgcaaaggcttacatggcttcttgagaaaagcaatttattttagattatagcacagcagctatcgtttaaactgctagggattgtaattgaactcagaaccaaccttttctgtgaacacagggtgcagtaataagtttacccaggctgttctaaataacatggacaccaggctttcaggacagaaaggcgtagtagccaaaacgtggagtcactagtgtcttgccaaccttccaacaactaaccccttccaaaatacattctgggaaatgtacctagctgtgcatccaaatatacacttgctgtctgctttctgtgatattaacatgaaatggctaggagacagcaatcttggggatgtgagagaatatgcaattagcacttggggacttttgttcaattcccatcttatctagggtcatgacagagcttggggtggggagttcgaggagaatacagaataaataaaactgttcctcttgatactggataatctttgatttgataatgaaggtgatgtgcttaccctccaaacccccgaatgtcatcctgtcattaagccctaatgaaagcttaattgttctgtcgagataaaatgatgtgtctcatttccgtacactgcatttgctctctcctcgttataaataaatccagttatactttattcgctattcctccagcgtgtccagtggcttagaagacagcatttcatacaggctcaattatgcgttgttgtttttagtaaaagagcttgtaacaatgtacttgctttttataatcataatttggaattgttttttatgaaagcaaaaataagcacgtagttaaaaatcaaatggttttgaaacacctgtagtgcaaagtaacagttcccagtcccacccttcccacctccagctgagctccctaaatgcaatcacttttcaacattcctggtcttacttccatattgctagttaacacttatttattttttatgttatctactgattttcttctaaagacaagaagtatttgccttacactaacttacactaaacttttcacatgctcccaccataacatgacattattctcaacttctattgggcttgccacttctaaattgtatttatacctcccctgattggtccatcaatctagcctgtgtctcttgcctccacacatcacaggatgagatatgggcactcaatacccttttcttcactgcttttcttttccttccactttccattctcggtcagctatataccattatttttgcattgtcaaatttaattgacatttgctctgtcaccagagtagtctttttttgtgatttttccaaagttggaaataatgaaaatatttgcacaattaagatttgctaaattatttagtgcagccccacatggtctctgtcacaattcctgtgatactcaaagacattgtgtctagaatcaggtgcaaatggattctcttcctttaaatcattttatcaaaatcattccaccttttagtttctgtaatatatatttcaagtttttcttataaagttatttttgttttttttgctggaatttctgatgtcctattgccttttctgagtatatacctcaataatatcttcaagttttttcaagctcataattacactctttgttctattggtcctgtctcttacagacctccattttgctcccatttggacaggttgctctgtagacatgctgtgtagaatcatcctgagatgtccccattgctctccagggttggagtcactgtttgctggattgaatgggttttctttcttttctaatttgccttctgattttgctattaacttcctaagaaagggtgtgtattaggccatttttgcattgctataaatacctgagactggataatttataaagaaaagaggtttaattggctcatggttctgcaggctttacaggaagcacggtgctggctcggcttctagggaggcctcaggaagcttacaattatggcagaaggggaaggggaagtaggcacataatgtgacgaagacaggagcaagaggcagagagagtggggaagcgaggtgctacacaattttaaaccaccagatctcatgtgaactcagagcaatagctcacttgtcaccaaggaaatagcccaagccatttatgagggatctgtccccatgatccaaacacctcccaccaggccccacctccagcaccggggattacattttgaagagatttgggcaggaacaaatatccaagccatatcagggtgaatgggaggtaaactttctgcatgcttgcaggtttagaattttttattttgccctcaaaagacaattgatagtttgggtgtagacttctctgttgaaaatcctttttcctgtcttttagtatgcaatcctgctgctgctaagtctgatgctactctgattcttattttgtaggccaccttcttttttttttacttttcaggaaattgttaggaatttcatttttctaccactttacagttaattattcttggtatcaagtagattcctatactttgaacattcatctttctctttaactctggggaattttaccatgcaatctctttgataattcactccagtttctttttttcttattgtgaaaatttggttagtcatccttagacctcctgaattgttcatctatatattttatttttttctcacttacttctgtacttggtctatagtctaggagattttttccaacgttgcctacaaactttctattgaattttttacttacgcatttataaaattccaaagagctctttcttatctgattattccttttcaatagaaccctgtttttgttttgtagttaccaaatctcctcaaatctttcttgacgatattaactagattttatttttaaagtttgtgtctttcccctaaactgttttctccagtgtcatgttttctgttgttttacttgctcattttcttttctgtggtagactttcttgtcatattaaatttctggtgatctgtggtgtgtgtgaaagaatgaggcaataagaaggctattgttgcggtctatttttaagtgggtgggtcttgtgaatagcaagcttgaagagtttcagtttagggtgtgtgcatgggaactggggaatcgcaatgtgctagagtaaggttttgttttgttttgttttgttttgttttgttttgttttgtttgagatgaactttcactctgttgcccaggctggagtgcaatgctgtgatcttggctcactgcaacctctgcctcccaggttcaagcaattctcctgcctcagcctcctgagtagctaggattacaggcacctgccaccatgctgaggtactttttgaatttttttttttttttttttttttttgagatggagtctcgctcttttgcccaggctggagtgcagtggcacaatctcagctcactgcaagctccgctcccgggttcacgccattctcctgcttcagcctcccaagtagctgagactacaggtgcctgccaccacacctgactaattgtatttttagtagagatggggtttcaccatattagccaggatggtctcgatatcctgacctcatgatccgccctcctgggcctcccaaagtgctgggattacaggcgtgaccgcgcctggccctactttttgtattttagtagagatgggatttcaccgtgttgaccaggctggtctcgaactcccaacctcaagtgatcccccctgccttggcctcccaaagtgctgggattacagacgtgaactaccacgcctggcctagagtgaggttttaacactaatgataactgtgatggttctccccacttttttattgccttgaagctggtgcttggcctcaggctagtccacatggagagccaggaggaagggtggtcaatgttacatattcatcctggcctgtaattaaccccccttttcagccccaccaatctcttccatcctgtgttgtacctgctatttctgaggctcgattctttctggaataaccaggcaggtcggccctcctttgccgcaatccctttttaggctgtggtttcctttgctgtgtggttcagaagccaacagacttttattcaaatcatttatcttctaatggcttcttcccattctctttgtggttatgagtttgcacttttgcatttctttagtatcatttagaaagtattttgggtgggaaaggcagtaaataggtttgctcagtggaccagtgtgaaccagaacactctatttttaaagacagagtttgtgatttttatatgccacatgtcaaagaaataccatgtagctcttcattttatgtcaaccgtttgttaatctaatgcttggaatgagcagatgcagaaagttgcaggaaggtttcattaattagatagagcttatacaaaatatacttggaaaaaaagtgtgttccgttcatttttctacagcctccaactgatcagcccagaagtttgtgtttcttaagctttagtgaattaaataagtttattaatttattttaaaaattcattatttatttattgaaaaaaaaaacgattggatctatcaaaatgctttccttttttctcagtaaataaatgggccaagacctcaagagtagatctgccaaaggatggccacaatggccaatgggtataccgaatttttcaataataaagattcaagttaaaataaattttaattttaattttgccacctgtaaaattaacaaaggtttgaaaatatgttttactgaaaaaggattataaaatgggtacttctatgtacttttggtaggaacaacaaaatttgttataaacttcctggtaatttaaaatgctcatagtatttaatctggcaattccccattttaggaatttaagacaagaaaataatcagaaattaagatcaagatggatttcttacaatgctcatcatagaataatgtataatagaaaaaccctaaatgacataaataaagaaaaaataaaatttggcactctataccatggaatattattcatacattaaataatgtttataaatagtttttaatgaattcataaaatgcttaggtataatttaggtaaaaaacaaaacaaaacttggaaatggtatatatatgaagtgctcaaccattcaaaaaggaaaaaaacctagaaggaactatactaacattttaactgtggtttttttgttggctgaattgtgtgacatgttttctttttttgcttcttaaaattttgttgcatttttcagatgttttctagtaactatgtttggttttgatagaagaaaaagaaaaacactttaaattatgtgcctctgaaagtaaaaatcttaaaaacgtcaccaaatgacccgcgtagttttcttcccctgaactttttcccttttctatcacagaagcaaaagtcgactgcataaagtagtatatgtagtgttttccattattgaaagtatttctcatgcatttggaaaagctaactagtacattatgttagatttcctgcctttttctctctgtatgtcacatcagatgtcgaaagtctgatttatttcaacattagctaaaggaatattcagattgtccagaagggggaagctatagctgtgtcttgaatggaattagagctgaagtgataaacagtggactgactaccagaccctcggctttagtcctggctagctcacttgatgactagtctgggctttctcttgtgaaaaatgaggatgctgaatggggtgatctctaaggtcctcttaggcctcttactccaacattgcaaattccttactatggaatagaccacaagaaactaagacaaagaaatgattgagtgagaggcatgtgttctgtagtatgttttgttgacaattctgtgctttaagcagagaacatgggttttttgaattaatacttttacatccacttgaacaatgagacaacagaggtaccacaagcccaaaatagaagacagactgtattttaggcctagaaaggattatttgctctcagaagcacagtatagactgagttttctggcccccagaacataaagataagttctacaattaattttggtgcatttgtttcccctctttgagaagatgtacccagttggcggaattttgtgtgaaaacagaagccattatgggacaggtgctggtgctttgtgcagtgagagccttgttgttaggccctggttgacgtctgctttgcccagtaactgctgctaccctgctatccttcctactgtattcaagatccaaaatggaaattgctgggtttttttttccagattataaaagtaatacctgactattttataacaattaaaatttaaaaatccaacacaacagaaaaatattaaaaaatatcagttatcctacaacagcaataagcttgattaatatgcaggattttctcccacacgttcttattcacacacatacacacactcacacaattgacacatccagtaatactattttgttgttttattttaccacgtatcatgtccatagaattttatatcgtcatttataatttcagtatagtattacattgtatgagtgaaatataatacacttggcttggatcaccccctttgaatgacttctagtttgtgtgcaactttggttcttagaagcaatgctgcaatgaagaattttttgttttgttttgtttttttgagatggactctcgctctgtcacccaggctggagtgcagtggtgccatctcggctagctgcaagctctgcctcccaggttaacgcctcagcctcctgcctcagactcctgagtagctgggactacaggtgcccgccaccacgcccggctaatttctttttgtatttttagtagagacggggtttcaccgtgttagccagaatggtctcgatctcctgacctggtgatccacccgtctcggcctcccaaagtgctgggattacaggcgtgagccaccgcgcccggccgcaatgaagaattttgtatgtatatctttgcactgttcttcaaccatttctcaaggagaattttatgaaaatggaatttctatgtcaataatatataacatatatgtgtgtatatgtaggtatatatacttacataaacacaggcatacacaatgttaactgccctccataaaagttggactattaattcctccaccactgccacagctttattcctccacatgccccttatcactgagtgaacctcagatgtttccaattgaagagagggtcaacaaactgcacctgagaagggagtctctggcttaaggcaggcgcaaacgcctttaggaagggccagatttgggagctgtcagtgggagttctgactcgctccttttttagcttttcatctcacattagctctcttagctctggagagttttgcagaacaagaaaagcaacaggagtgttttgcctttgctcctgcgatgcttcatcaagtaacaggtgtccagattttcactgtctactatatgtaagtgccccccttcctgtttacctggcatatggtgtttttagcaatattcaatgttttctgtttgtttcctttgctttaggcttctaccctcccccaaatccttcacccccaactcctagactgcccacctgctacactagaccagggagataaagtaccacgcacaattgttcttaagcccagaccattgattttcctgagtttaagctggcatcatgagttgttaaccctgttagaaaaatacaagttggatttatgattcccttacacaggtaattgggctctaattttaaaatccaagccaattgatttataccatattgcattataaataacaaaagcgcagttcagtccaggtgacgtatgaatttgagcttccaattacctgataaattttcagttcattgataagtgatacctaggtggacgtcaacctgttgtggttccctctacccactccctgactccccaccccattgtcgtcccatctatcctctgtcctctcatttttcccttttttcctaagcttgaaggcttaggagtgacctgcttcagaagtccaaaccctgcatattgagacattatcaggacttttgtgtcttattcttccccacaaactcttgttaacattttatttcaactcacagtgtatttctgctgggtcactattattgcattgattataatatttgctgttaagccaccaggtatataaattgctttcttggtgtatgacaattcatccccaagattactagcttttcccatcctttttcctcctttgcaataattttctgcattgtatgtattctacatatttctgtaaaacatatcaagttatttttggaacaaaggttggctataaacaaataacacatactgctagaatcggtttctgggagtcttgaagagttatccagcaatcagaggcagttaattggaatctctatttcaaggtgtttttcttcttttggcaagcccttgttattttgagcaggggactattttaagtaatcctttgaacatttgtcagatcaaggggcagaggagaggacaaccagggataaacctgggcaagtggaaagaaccctggacttgagagcctcgagtaccagagtctcttcttctttctaggaggccttgggcaggtcccttcacctctctaaatctcacttctcacatttgcaacatgatttccttatctctgaggcccttcagaattgcaggagctaaatctaaaggctgtaactttggagaaaagtctaatctctcaccccattatgactttctgtgttacttttaactcccacccttctgaaaaacaaattacctgctgcagagtatttgaaagtgctcaggtattggatggctaccctgtaagaaatattttctgcctcacgctaaagcaagtaaagagagtagactctctcccatgcctttccacaacgatatgttttcctagtgttcattgctaaaggtatatttcttaggagggccatgtagggatatggaagaaatatgtgaagtagcagaggaagctgttaggaaaaatctgtattgtattaaacgaagagctctcttgctgtatgtaggaccacttcttgagcatggccaattctgagctattttaaaaataaactagagcactgtgattgctgaatgatagcattgcagtttcgctctatatgctctgggttatgtaatccacattttctcttcttttctggtaaattgtttgaagtaatgcaggtgggagaagtgttctgatttgaattaaggccaggtgaagacagtgaaataatcagttactttacagttttgcttttttcccccacttttacccttaaccagtcactgtgagtaacgccatgtcaactctgctctctagtaacattggtggttctttttctttcaaaaaattttttctcacttttttctaactcctctaaaagaaattgtttcccccacaaaagaaaatcagaattatttttataaagttctcagcagctctttaaaatattctttttggctgatgaatccagtcacttttgatctgtgagcataatggataaaaaacttgtatgaaattgaatctgaaaatttcattttattgtgaatagatccaaaatgttttatttttgacagtcccagataaaggatgatataattaggcatctgacttaactatgagagaatttttttcttaggcaaattacacggttgtttttcaaatggacatgggcagaattaaccagatttaataccattttgctcacttgatattaaaaaatgtgtgcgtaaatgtatatatatataagtaattttttacattcttgaccatgtattacttcccatttcaggttataaccagtaggaatttgctagttcactccggtaattatctgttctcctagctgcaaacactgctaagtagcctttaaatgcagctgagatgattgttaaaagaacatttaaaatccttccattaaaaacaagtaaccaaatttggtaaagttctttctgaccatctgggctcttgcaaaagttgagaaatctagggcactatcaggaatgtcaccaatagctagttattcgagagtaatttcatgtgtgaggaatgcgttggaagactattttaagtccacatatttcaagtaggttttatttatttgaatctgggaacatagggattgaaaaattctcaaggtaagcttttggttgtgaagtcatttataaccaaatcagcagtgatcagtgaaagctggagattataattgaattggggagtgttgaggctcttatagcgttaactatttgaagttgttatagaaaccgtatagtaaaatatgacgtacacacatatatatgtgtacgacgtaggtagtaggatgttagaatggttgtattgtctattgtctcagtttcacagagccacccataatacagcgaccaaaagacagctgcctcatatagaaagtcatgatcctggtccatggcttttgtatatatgagtccagaggagacaagagaagatgtctctttagagacaactgtggccatgtattgagtcatcattaccctcttgggagaaaaagtagagtgtactatcttgtaacccaaaaccccaataggaggcattaagaggactaatcagaaagctctgaattatttcttgcagttggaaaaccagaggcttgtgcctgcatcaagcctgggaagtttagagggcccatgcatttgagactcaccctgaaactctggaaggccaggagaagaggggctggccaactgcttgggtggtagggtaggaatgctcctgcttgcgaagtggccaatatttcccagtttttgtcaaggcatgagatgtgtgtgtttcctggggatcagttctggactgtgcaaaggagagggccaacgtggggttgtttttgatatacttcaatacagtaactgaaggagtcatggaaaagtagcatatgaagtccaaggcagatgcctagatgacctggggcttgggatgggggatccccggccacccacctgggatctagtgagctgtttgagaaaagaacccaacaggaaacctctgcagaatccataaaagcttatcaaaagagaaagtgtcagccctaactatctgccaggcccagagacagccaagctagattataacagaactagcacaaggaggagcccttctgtctcttagtttcttcaaccttgagaaaggcagaatgctggctaataaggtggaggggccacagggtgatctggaggctttcagtctgaagcagggacaagctgagaaggggaaagattccatacaaaagcaacatggttgtggagtttgttttctcacctgggactgtatgtgtaacctgaagttgttttagaactgcccattacctgtgaacagcaaactcgtgggcctgctgtagtttttatccaagggcaaaggaagattattaccacctaatcaaatttagaggggcaaggagagtaaaatgttgtgttttatgcaatggatcatgcttgttcagcatactcgttacatgaagttatgtatttgtatgcttatttctaaacagacatgctctctacaaaactcctaggtacatacctatgtattcaacacatattaataaatgtatctatttagattaatagaaccatttttttcagtaaaataatttgctttaggaaccaacattaatcaatttcaaattttcaatatttcacggtatcagtttttcaacatgcttgtattactgttttctcccattttaatattagagataatgagaaaacaaaaatattgtggggcaaacacctatgaagaaaaacaggatatatagaatagattcagtagcaggaaagcatgttaaattttctctttttcagtcttgtagtacctgtctattctagaacatctttcctccagtgcagcatttcctaaaatatggccttcaggatagtaagaggaagtatttgaaatgacggtttcctagttagatatgtgagggaaacacatttccctttgccaagctctaccagccatgggatttctcaaactctctgttagtgtatgttgtaaatttcacagtggcattgcccaaacatatttggtaacagcacactgttttgatgggggctgtgttttgaaaacatgcctttaagatccctggtggactgttcaagtctcatagttaccctcacaaatacagaacatagattccagatcccaaaaatatcagatgattctaatgatgataagttatttctggaggcaaggaaatatattctgccaattcgttcctttctggtttggaggaaactacttaatgcagatactactacccttgatcatagaaggagtataaataattgagtatactgcaaccctaaggtgatcattcttgactttgtggctggagaaagttttgacatatctaaaacctatttagaagaccatctgcgtacagcatctacatgagcctaagaatgcaagtaacttggttttattaaacacttttgcatctgtgaatctagatgtaggatttagcttggtacagttaagatcactctgcctcgtagtatagtctgaagtcgggtaatatgccttaagatttgttctttttgcttagtcttgctttgtctatgcaggttcttttttggttccatatgaattttaggattgttttttctagttctgtgaagaatgatgatggtattttgatgggaattgcatggaatctgtaggttgctcttggaaatatggtcattttcacaatattgattctacccatctatgagcataggatgtgtttccagtaatttaatgctgtggggggtgggggaaagaaaacaaaatcatgttgtacattgaaagggaaaaacgtagatggtctctagagtggaaaactgttgtcactttatcttgcagtgaagactcattcattcgacaatagttgggtgcctactatgagccagattatatgtgaggccctggaaatgcaatggtactcaaagatacacatagtccttgccacgtggaactaccagttcagctggggagatagacaatatcaaacagccataccaaaaactgtgaaagtgctttcatgaaggaaaagttccagatgctatgacagtatgtcttaggggctttgacctcattagtgaacatgggaaagtttcctctggaaagtgacaattgagctaagataggaataggagttaacaagtgaaggaagggaggaaagcacattaagggcagagaaagcagcaggtacaaaacccagggccagaggaagcagggttggcatcaccaaccaagagaggaccacatacccctggagcgggggaggtggggggaagaggatactcctctcccatctgatcttgagattgtttccacctgtgatgactttgctctgaactcttctctttcgcagagtgatggttaaagcccaatggaaaatgcaaccacatttctccccttttttgtgcatttactttggaaatttctaatatagaagaaaagatttttgttttacaaacttgagaatgagcatgagtagctccttaccgtttcccccatggggagggtgtgtgtgtgtgggtaaagaatctgttatcattcattgtctttgggcctcttgtgaaatgcttagaaatactcagttccatttaaattaaggatctgcaaccctgggtctgactgaattagcttttgccaaatggccatcatttctaactaactgtggctttgaagatcttatgtattccagtgtggtgtaaattaccctttgggggcatgtgctggtaattctccatcccccgccttcctagcctattaggcgaccttgtctgccctgcttgttgacccaggaggttgactgtgtcacctgggcttccatgtctctgtcttccagtttgggcttggtcaatgggaggtactggaaagagaccaggcaatgggcagagagagagagatgggggatgtttactcccatggaagtctttctcatcatgtttttcagggtctgtgtcccttcaaggctgtagcagtgatgatagtcgtcccactccccaccccctacccctaacccacccacctttacctcaccaggctctgataacatgttctctttctttgcttttttaggcccaggatactaaaggcattctgctgtagctagtaccaggggcttcaaatccttaccttgtaacccaacctccacctctgaaaatagtttatttctcttcaaagttgcagaggagtatgacatctgtgtcctgtcaggattctgactgatgccatcagaatctggtttttggctgcccattttattctctcccttccaaaacctgaataggcttcagatggagataactagggaccagaagaaggatggtgaaattcccaggattatacaagctcactttcctctctttgggcccaaagtagatcagtctctggagaaacgaaggacactgtttgtcatcatatatctgcctggctgtcattcaggacctaattggactctcgtaaatttcattcttttcatgcttgtcatgtttctgggcccctgagaaaattcttgccatgcaaattctgaagcaagacattttgacatagccattttgatgctgtgggtattttaatcttcaaagtgcaaagaatagaatataggtcataggcacaatagacatcttcacaccctcctgggccctctgcctcatccttgtacctcatcttcacttgaattgtatttttactttgtaaaaatattcttacatatatgcaaaactcaagagaatagtatggattctcatgcatctgtcatccaacttccatgatgatcaacctatacttgagcacatgtattttttccttttcttttcttttttttgagacagagtttcactcctgttgcccaggccggagtgcaatggcataatcttggcttactacaacctccacctcccagtttcaagcaattctcctgcctcagcctcccaagtagctgggattacaggtacccaccaccatacctggctaaattttgtatttttggtaaagacagggtttcaccatgttggtcaggctggtcttgaactcctgacctcaggtgatcctcctgcctcagccacccaaagtgctgggattacaggcatgagccaccacacctggcctgtgtgtttcttttttgctgatgtttaaagcaaatcctactcaattatttcacctataaatactttagtatgtttatttagcagataaggactttaaatgtaatcacagtagcatgcaataaaatgagcaagcattctttaatatatgataaatagtccatgtttgattttcattcatttcctcacatttttttcagttgagtttttaaaatcataagccatatgacatccatgcattgcctttggttgctttgtctcttggattttctttaatttctctcaatcctccacctttaaattttcttattgaagtatgacaaaaacagcaaaagtgcacacattttaagtgtttagctcaataaatattttcaaaataaacatcccatgtaactatttctcaaagatgtagaaaataccactcactagcactagtacccagaaatttcctgttcactaagtgaacacctgctctgcaagatatacaccattttaataatcatggattgattttatctgtttttaaacttcaatagaataatacagcaacttatctttttgatctgtctttggggaatttcaactgtcttttaggaaaaaaaaagcttattggggtatagtgtgtatataataaactgtgcccatgtaaaattcattcattgagctttaaaagagggatacacccatgagtccaccaaaatcaaggtgcagaacatttctgccacccctaaaactttccttgtgccacactgtggacatttccttctgtcactcccagctctcaggcaaccgttgattttattttctgtcactagcggtgattttgcattttctaggatttttaatgaattaactcataatatgaactcccttgtgtctcgcttcctttagtgaacataatgacttggagaatagtggttgcatgtgttaatgttcctttttattgcagaatagtattccattgtatggttattcgacattttgtgtatccattcacttggttcacataggggttgtttacaagtttggattattatgaatgaagctgcttatgtatagatatttgtgtggacatgtattcatttctcttgattaaattgttagagtggtacttaccccaatttacctagtactctttcttccatcctacattctatgctttcatctgggaaatttttaatctgcccaaataaccccctttagttccttttagtgtttcctttaatgtggattttatcttcttgcagagatatgttaacattctggcaggtggatacagtataagcaagttatattgatttaatccagaaatgatatttttcaaattctgtggtctatttctagtttgtcctaacaattcaagccttttgagtttctcaaatgaaattttggggcatttacgatggccctttctccttagtgtcttctaaattgcaattttgtctccccaacccttttagactgacaaaatggctccttcgtttttggtcttttagcattgatttttgcttagtttattggtctcttcatatatttgcagtttaggaatttgcaaatatctcaaggggaaattacgttaggagtattgggatcacttttctttggttcaccgttctcacaaatcttagtccctcaagtcctagctgctgcttctatagcccttaacttccaaacttctctctctagctcagaaactgcatcaagctctagctgctgctttctacttggtttattccctcacgatgcaaattcgcaaatgcccttaggacacaaagttgctttaactatagagctcacctcagtgggctttctttccctgcatcatctaggatgcttgaatcttgcatgccttggttgtgctctgatgcttttgaacagctttttttttttttttaatttatgcatctatcacaattactttctgcaggaggattagtctgatgtatgaagttattcattcatagccagaagcataacttttccagtcatgttttaaggaaagccctccattcccacccccaacacaccattttttaaaatgacatttgtttgttgagaagatatgccattcacaccctctttgaatttttcacacatttgatttctgatttgcatttttgtagtcattcttaaacacgtttcttctgtttctggtaaatatttggttatatatcataggatgttaatatatctccctatgatagtaacattaatatatcatagggagcatcacaccatgagccataaaatgaaaagattcctgaactttgctccacagtggaatcacctaaaacatctcaaattaaaattactgatactcttaccccagacattgtgatttgattgatctggtacacgacctgaacattaagatttttaagagttccccaagtgattctaatgtgcttcaaagtatgggaaccactgatgtaatgtactattatcccacatttagttaagttaggattgatcctagattcacatgttgtcagtgtgatgccttaaatatcaagtttccaattaagctttaaggcaaaggttttgcagctatgaatggtggttgtctagacccattatttcattaagagctgtgaaatggtgattttctaaatctgtcattcctcctgcttttattaactgtgattcctctatgaggaaaaacgttccctccatgtcgtgttgttactttgaaaggttgtccatacaggaaaggcagggtaagtgtttaatttcccttagtttctttttgttaatattttctaaatcataagttggtgtcctggcaacttctaagggtgaccattgatttttactcttaagaaatgtttgaatgtttgtgtatttgatctatttcattctaccactttcattgtttttattgaagttgatttgtcttggccagtgggagcccctttcaagttagctccaagtccttttgacattactctagtaggttttgatagctttccacaacaaaatttgccaattcatcatgtctatttcctggagcagatctggaatcagtcatttctttaagaatccctggtccctttccgtgaaaagaaatgcttaaaagtccaaaatagaggcactaagtacaaccttatccttatctctcagcctattcatttctcccaatttacttgacaagactaatcataataataacctaattcaattttttaccacatactgtatatatgttttaggatacttctctgcacttcagtgttcacatctatgaaatgggaatgataattgaaataatctaagcataatgcttgtcccattggctttacaatagacagccaataggaataatgatggtgacaatagtaattatgtggcaataatggtagtagtgatggtagcagttcattttttcaacaaattattatgtatctaatgtaagcactggacataggcagtagtagtgatggtcatagtagttattttttaaataaatatacccttcctatatgtgaggtaccatattgagtactagagatggaatggtaaacgagacaggcatagcccttatctttaaggggagaaatgaaagacaaactggcaaatataaattatttttgatcaaaaagcatttacttaggtaattctctaacttctactaaaattccaagaagtttcataccaaaatcaaaatgactgcttcaaagtggtgctatcaaagtggccataatgaaatgtctcctacccaagtgtcctatgcattttgctgagtctttttttttctctaagcacctttcccttgagaactagttttaatgaaggggattcttttgcagtgactcagagggttgaaactggagcttctcttctctctctatccctggtgctgccaggattcccagacagcagctgtttcccaaggagatccacctgtcttggaaatggaaggaagccccaccagcccccaccatgacttggcctcagaggaggagaaaggcaccatcaaagcaagggtttctatagaacccagagtcaggaagccacttggctttctctgttactttagagtgaaaatgaggtcacaggatgtccctttctgtgaatgattgaataaaagaccaagagaaaaccttctccgtgtccaacagctaaaagtatcctcatgctgtgaaggactcacttttttggctttttatgtagtagccaaaagacagtctcagcaggataggagcacaggacgctggagaggtgagagcggttattttcctcctctcacttctggtgatgcctgcttacttcatagcgggggaaagcctcttaattggaaaaagaataacacaaaattttcagcattttgccactcttgatcttgcgttattttctcttactacataggaatttatcaggattcttcctcctcttgatcattgtgtccatccataggaatttatccagctcccttttgtggaaagtgaactgttttttaactgtaggacatgcccaagtctggtaaccttgaggatcttgttgtctagaggatgaaggtaaaattcattcattctggccaggcgtgatggctcatgcctgtaatcccagcactttgggaggccaaggcgggtggatcatgaggtcaagagatcgagaccatcctgaccaacatggtgaaaccccatctctactaaaaatataaaaattagctaggcgtggtggtgcatgcctgtagttccagctactctggaggctgaagcaggagactcacttgaacctgagaggtggaggttgcagtgagccgagattgagatggcgccactgcactccagtctgggcgagagagcaagactctgtctcaaaaaaaaaaaatcattgtacaaagcttaattgattctgcacaggattcttgggcctgggttaaagtcatgaatccagtagaaaatgctcctattctcctgagcaggggttgacaaactaagaccaaattcagctgtggcctgtgtgtatgaccctttgagctaataatagatttatgtatttaaagtattcttttttaaaaatgcaagagactatatatatatgtggctcacaaaggcaaaaatacttgctgtctgcccgtttaagggaaaagtttgccaaccctgctcttggacatttatcccgaggctgctttttctattatataaaggtcatgagtatgggctcagagttccaattctgactcggccacttactatgcagtcttaggcaagtggcttcactcctctgagcttttaatctgtcaaaagaaaatactaagagtcagccaggcagcaaatatttatggagtatctacaacttaccagggatttctaggcatgggacatggagtaagataataaacatacacacaaatagatgacttaaattcctataaaactatgaagacaaatggagccaggtagtagaggtggggaaagggtagtgtggttggggggtttatgtgcaagaaaacggcttatgaaggaggggagtggtcaactggccaaatgccactaagtggttcagtaaagggaggccagaaattggccacgggctttggcaagatgcggtttacgagggagatgctatgagtggcctttggcctttatgcattcataataaaaagaaaaatgtggtgattctggctttttaaagaacctggagtaatctttcaaaggaaacaaataggctgaatttaaaaaaacttctgcaagtaattttatatttctgactctaacaattgtattatagataataaggaacaaagaaattaatgactgcctgctgtccttttagtttgtgtccctaagatctgctgcagtattccaaaattatcctgctcttagggtgctaattggaaacatttttcaattgaaatcttttataggctgggcgcagtggggcatgcagtagctctagctactcaggaggctgaggtgcgaggattgcttgagcccaggtgtttgaggctgttgtgggttgaggatagtacctgtgaatagccactgcactccagcctgggaaatagagatggcgtctcactctaaaataaggtattttccacatgggaatgcaaaagaaatcatgttaaaacaaatccctgtgacttttaaatgcatgtctaagccaatatttgcaaacagcatttagggtgaattagcatggaacacttcgggtttctaacacagagaggtattctcccaaacttcttctcctctttctcatttatcacaaagattttttcatcttggtgctcgtctgcagcatcagaggaaactctggccacacagcactgcattactggagagaaaatgctggtgccgttaccccaggatagaaaagaagaaaaaaggccaacgtctattgattgcgatttctcaagcagagtgatgcctttaacactctgtaatgaaagtttttatatgtgagagggattaccaacactgggctgttactgtcctttgatgtgcctcagaaatattacagaagttattaaagaatcaattgtgggaagccaactgccctactcgggcagcttcttgctttgctcctggctaatttatgtagcggtgaattttctttcttcgtctcctagttcagtttgttagcttttgaaaagattttttttttgttgttttagagtggtgtgagagtagattggcaacccgtttaagttcaggatagcaaatgagttgagactaacagcatctatctaggcacatgtgaaacatgtttgtgtccccagaactcactgaagttggctttcacccattttacagatgaggaaagtgaagctcagaggagtcaggacatggccaaggtcactgtgccaattggatgtccacccacaaacgtgaaacaggctcatgttactcaaagtccagtgatttctacttacagtacagcagctctgtgccagagagaaggttaaaattgtttaaaacctggaaactaatgaaacatgaagaaatcatatgctatgagcctgtgcgttccccagatttccactgaactggaaattgttgggacaccaccgtgggtctgaaacctttccctggcagctggacttggtgtccgcagaggcgctctgtggcttgtggttaaatcgcgcagatggaaaccaggcagtgcttgggtacgggctcatgctttctcctcgcttgcccaaattaagctgcctaactgtgttcctggggaggctgaaggtttgttgagggtcagctagcatttcctaacagctctctagaatgcgagtagcatacagtttcctttcccaagtgatgacagacacagtcatcgcggaatagcttgaaagatttttctaaatttggactgcttttatttggctccttatattaaatccaaaggacctcacataacaccatcttttgtacaactgttttgatccatgattttatagcttctcaagtcagaaatgttccaagtatgtacagattaccgctttatacttaaatataataatttgttgtatttctaatacttattgtgtgtttactgtgggggcaggtattgtactaacagctttacacatattatttgatttagcttttgcagtagttgtggagctttcattattcctcttatacaggtaggaaatctgggggttaagtcacttgctcaatatcacacagctagttcatcgtgcaatcgggatgtggaatcaggtggtttgactcatgtctcatattcctaactattgcctccctagattaataaagtctttgaggatattttgggcacatttctttttattaaattgctttgaaggttatttatttcttacagattttgtttaggcttgtggcaatctacagttgtattttgcatagaaggaaactaacaccccaagaagtaaaatgtccacagcatggttcttcttacactctcccatccttgccccttttactctgttctcttttgctcacaagatacctacctctgaaggagtttagtgtcaggtttcaagattctgcattattgataacttgcttagtgtccaaaggctggagaagctatgttgcattgtctcctctgggtctagaaataacctctgttgtattgtctaagaaggtagtgagggaaagaaatccattctcaaaagagaactttagttttttttaaccctttcctcggtgacaatgaattttagaaaatttatttacattaaggtttgttgattaattgagaataagataaagatactaagaagtatgtccttcccatgatttttggaattagggtcaaattatggcgttagcttgttctagaaagtttatctccgaggtattcttttggccacattttcatccgattagttttgtgagccagacctggaaatcaggactaaattatattctgtgcctttgtcacctctttacgtccctgcggaaactgtcatctgccagcatttggagaagacgcgctctcctacaacacctcttctgtattcaagtcatctttactacaaaaacaaaagacatggagccccttggtaacgggccatgtcaacttggagctaagatagttgttcggaagagaagtacaggtgtagaaacacagcatgtgctaaaagtagtttctgtggaaaacctgatccttctattccctgtggttactgagtgagtagaactcctggcagaaatcagagaaatcgttctcatacatcatttactctttcaccactaaccactcttagaggaaccaatcatttaagaattagtcagcccctgaagatgtctgtggctgtcttcatgattttcccccatttttgaaacttagtagttgcaattaaaaaaaaacaaaaaacaaaaaaaaaacacttctttcccaaattctccccagccaagagcacattctagttgaatctagagactggcacaaaaataatttcaattttcagagtcctacccgtggtgtttcttgcgtccatctctaaatcccagtagaagatgctggtagtctgcccagttctgtgtagctgtgtggtacaaacaacagctaactctttttttcatgtttcatctcagaagaaactgggttttctgtgttacccaaagtgatttattgttttccatgcaaatgagagtcggattttaaaatagcattaagatggttctagaggaaaggcacggtgcccacgtaagtcattatctggggatgccgtgcgacacacgcacatggtagcatatggtggcggtggatggactgaggcccagagagacaatttgatggatttctttgagactctgaattagacagtgcctccggagatgaaagaaggctatttttcataaagttatctcccctccccctgccaacttcccctcttctctaagtgttaatttttttcctcttgttctaggggatgggcccctggattaggttgatgacagattaatgaatggataggtccagcaagcacaggcattgttgccatctccctccgcatttctgcatggatcccctagatgtaaatcagaataatagttagtgaaacaatgctcaggtgctggaaagacaggctcttgtttttaggctctctggaaaattttccctttatttgattttggtggtttcagtcatatggtctaatacagtttcatacaaatgtaatctggcttccccagcctagtacaacccaaatcaaaatgatattatacctcttcacagctgtaaatccttcctcaaattaaagctctgaaacctaatctgctagaagtctacagaggaggaggggcgcctcaagctccccaccaagaatagcattaagcatctaatgacaacttgacagagacttttatctgttgtcccctgtgaaataaaatcttcaaagttatctgcctcctctttgaaacttagcacaggctgtacttggccaggtgtctcaaagctgataccaagagggcaaagattgagagtgttttttactcagttatttctgtgttttttttttttttttttttttaatgacctgggaagaagtgagtaaatttgacatgtggctattttccaaaaaaggttaaagaatcctaacagggactcaggtaagacattgatttaattgaattcatcaattaaccagtgatttaattactctgtataaaccagagggacgtcaagataggacaaggagtgggtcagtcttgggtgagaggaaggattagaaagctggagaactagatgagctagatttcctggcaaagttcaactgtaagtgttgagtggatgggcaggggcctggcagagtctcagggatggcgtaaggctcacatagtaggcagacactgctaagacaaatgctgggttaagtgtctcttgcatctagaacacaattagttcccagagaggcttgtggtggtggtacagtgactccttttttgtgttactattccaggaattttccagagcttctagacatggtccccttaatataggattttgattgctttggaaagagtgggttcttgcaactctaaacaagaggacaaacatgtatcctttgtgatcaacgagagcattgcttaggcattttagtctccctgggggaatagggtagaggctgattattcaaaatcatttgccttctgtccagtagtgtcttcttttggtgtcgacttcctcacactggttgtcatttataaaactgatggaatcacactagttgtgtcacatcagttaatgataccagagtacacactttaggtttctgagataacttcgaaaatgaagccagacctcctggctagaagaatcttggaatactttattgatagagtcctttaggacataggagtcaggtagggttcctgtttgaaccagtctctgggaggatactttcagaaagataacataagacaaatagccctcccatacgctttgatccccagggcagccagtgtaacaaaggaacaggagcaaggtcctgacactgtcattcaaaaaataccttttgggagcagctatcaagtgtcaggctagccagacactgttttaggctctgagaatactagagtgaataaaatagtttgtatccctgctcttatgattctaggattgtcatctttaaatgggcactgtgtttcaaagactgcaagtagcctacattaacttgggacttcttaatagaggcagtctacctagatacattaaagcaatcaagtggggacaacagaacaaaagaaaaacaggaagggcattattctagaatctggccagtgacggctactcagctttaagggacaagaacctatcagagaaagatagagttggaaaatcattttactttccttgagttgactttaattctgctttaatactagacacggctttcatcatgctaaactaggctttcctgcagtaataagcaacctctaagtctcagaggcttaaagagaagtttcttggagttttatttccagaatggcagaataaggtgttccatggaccatttcccagaaaacatccataactgatgaaaaatataaagaaactcatttaaagtctctggaaattattgtaatggaatatgacaaatcaaaagcacttatgtgagcaaatctgaagaatctccctaagaacatgagagtctgtagcatgtcagacacagcctgctatctatccctttcatgtagctctgtgagatggagcctccactctgggcagatgtggccaaagagatggtgctgcctttcccctcagcttccagtcaagggatatggtatctcactgaggaacaggtcactagaatttctcattccctctgccctaaactgcagaggctaagttcttggtgagagtggcggaaagtttaggaattaccttcttccacctacccccaactaattaggtggatgttctaccccgggtatgggaggctgagaatattgaggccccagtcccccttgcctcagcttactcataggcagattctatgctgagagaggcaagctgagagaggcaagctaagaaagccagaggctgccacccccaacaagtcccctactcagaaagtataggtgttactctgcctgccagctctggagctccaggctcagattttgctaggggtagaagcagtccataagaactctgaagctcataggaattgatttcatttgaaacagtggggggaatgtcaagcctaactaaggtcattgtccaaagcaatagacattgtggtgataagccattaaaaggaggctggtagctctataaaatctacaagctaacccatcgattacctagatgatcagagagaatcaaagaaaggtaaaggtaagagagccctcctggagtaacgaaaaattggcctgaagatctaactcccaaaggcccttgaatttaattgggtcagactgtggagaaatttatgcctctagggtatttttcaaaacaatagaatgattatccagtaattagtgaagcataacagctgggtgtgaggccaattgaggcagacaacagaaatatcagagaaagagataaaaccttcaatattcattgttctcaagtgtacatggaacattttccaaatataccacatgctaagccataaaagcctcaatatattcaaatgattgaaatcatataaagtatattctctagctacaataaggtgaaattagaaatctaacatatttttggaaacttgcaaatacacagaacttaaacaacacactcctaaatatccaatgagtcaatttaaaaaatcacaatgaaaatgagaaacaattttatgtcattgatgaaaatgaagatgtaacataacagctgatagaatgcaactaaaacagggctttgagggaaacatatagcttaagtacctgtatttttaaaaaatctcaaatcagtaacctatgtttcaccttaataaactataaaatgagtaaaccacacaaagcagaagaaaataataaaggttggaacagaaattaatgaaatagagaatagaaaaatagaatcaatgtaaccagagttggttcaaaagatgaacaaaccagagaaaactttacctagactgactaagcaggaaagaaagaagactcaaattattaaaatcaggaataaaaagtgggacctggccaggcgcagtggctcacgcctataattccagccctttgggaggctgaggtgggcggatcacgtggtcaggagtatgtgactagcctggccaatatggtgacaccccgtctctactaaaaatacgaaaattagccgggtgtggtggcacatgcctgtagtcccagctactcgggaagctgaggcagaagaattgcttgaacctgggaggcagaggtttcagtgagcctagatcccgccactgcactccagcctgtcactgcactccagcctgggtggcagagcgagactccatctcaaaaattaaaaaaggggaccttactactcaccttgcagaaagaaaaaggattacaagggaaaacaatgaataaatgtatgactatgaattggataacttggatgaaatgaacaaattcctaaacagatacaaacaaaactgattctacaaatataaagcctgaataacccatcaaaagtaaaaagactgaatatatattttttataataaaaaactacccacaaataaaagtccaagttcagatgacttcactggccaattctaccaaacatttaaaaaattaatatcagtttttcagaaactcttccaaaaattatcactacattctatgaggccaatagcatcctgttaaccaaaacagacagacatcacaatgcaaggaaactacagaccaatatcttatcaatacagatgtaaaaatcctcagtggaagacaagcaaactggatccagcaacatattttgtaccatggccatgtggaatttatcccagaaatgcaagatcattttaacatatgaaaactaataaatgtaatatagcatatcaatagaataaaggataaaagcaacatgattatatcaatagacatagaaaaaatatttgaaaaacatttaacaccctttcatgataaaaacactcaaggaaatagaatagtatgaaactttctcaacctgataaaaagcattattaaaaattcacagctcatatcatacttaacagtaaaaaaaaaaaaaaaaaagagtgttttcccctaagataaggaagaaggcacagatatcccctcttgccatttccattcaacattgtctaacagttctaaccagggaaattaggcaagaaaaagaaactgcattcatatttgaaaagaagaaaaactttattataaatggcataatcttatatatagaagatcttaaatccactaaaaaacctatcagaaataaacaagttgagcaagtttttaggatacaagaacaatatacacaaactcattctctctattcacttgtgatagacaatcagaaaatgaaactgagaaaattccatttatgagggcatcaaaaagaataaatacttgggaataaattaaaagcaacaaaaaatataaactctgaatttatgtatatttgaaataagttgaagaatatctaaatacaaggcaagactttttatgtttggggattggaagagttattgttaaaagtgccaaaaattgttgagtgccataaagattcaatgcaactcctatcaaaatctcagcagatattgttgtaaaacttgacaggataatcctaaaatcatacagaaattcaagggatcctgagaatagctgaaacagtcttgaaaaaaagtgcgaacttggaggatttcctggtttcggaactcatgacaactctacagtgatcaagagagtgtagtgctgacataacaataaagatcaatggcatagaactgagattccagaaataaactcacatttactatcaactgattttcaaaagtgctgccaagacaattcatggtaaaaaccttttaaacaaatgattctggggcaactaggtctccacatgcaaaagaatgaatttggatccttacctgaccccatatacaaagattatctcaaaatgaatcttggcctcaaatgtaaaagctaaaactataaaactcttagaaggaaacataagcataacaaatggccttggattaggcaaaatattttagatatgatgtcttaacaacatatggaaaaagacaacacaagcaacaaatggaaaaagacacaagcattaaaaacttttgtgtttccatggataacatccagaagctgaaaagaaactccacagaatgggataaaatacttacatatcatatatctgataagagacttgtatctagaatatataaatatttgtataaacccaatttaaaaaatggataaaaggtctgaatagatatttatccaaagaagatatacagatgaccaataagcccataaaaagatactcagcatcactagtcatcaagaaaatacaaatcaaaaccatagtgagataccacatcacctcataggatggctataattgaaaagaagacatagaggaacttgaacatacattgctggtgagaatgtaacatggtatagccactttggaaaacagtctatcatttccccaaaaggttgaaaaacgaattgccatatgattcagcaattccacctgtagatatatacccaagagaaatgaaaacatatgtccactcaaaagcttgtacgtgaatgttcatagcaacattaaacttgctaaaaactagaaacaaggccaggcgtggtcgttcatgcctgtaatcccaacattttgggaggctgaggcgagtggatcacttgagctcagaagttcaagaccagtctgggcaacatggtgaaacctcacctctacaaaaaatacaaaaatttgccaggcatggtggcatgtgcctgtagtcccagatacttgggaggctgaagtgggaggattgcttgagcctgagaggcggagattgcagtgagctgagattgtgccattgtactccagcctgagcaacagggcaagactgtctcaaaaacaaacaaacaaacaaacaaaaaaaaaaactagaaacaagccaaatatcttatcaatttctgaatggacaaacatggcatatcctgtcaattcaatatcatcttgtaaaaaaaaggaatgaagtactgatacatgttacaacatggatgaaccttataaacattacagtaagtgaaagaagccagtcagaaaagaccacatatggaataatggacagccagagggtcaggcctaccacagacacatttaacattattaacattgctaagtaatttcagtaatattatttattccaagtttttattctgcctttatccagtttttcttcttggtagactccattcccacccttcttgaatattttacttttggaatcattgtcaaagcagtcctctctcttcattcctattctcattcatgttcctatatttataaaactataaaacttgctcagattcctgtattttgctgggactctccatcagcttcctaacttgggctggtcttctgtccaattccattcaaatccacaccagctgtagggatttttctaaacttcatatccaacctgtcctctgccaaatcttgccaaatatgtgttcatcattgtcaagttgaagcccaagctgctcagcatggctgacttaaaaagtaagctaagctttcctgctgtctcttaccactccttgcttctcattttgcattctggcaccactgaactgcatggacttctctgcatacgtcctactggcttttgccttcacaccactggctctaccatttcttctctctgggatgctctcctcattaacttttggcctccttactccacttaggcatggattaaacagcccttttgaatgtgctctgagtcagtttttctgtttttctctgtattactataacattgtacttagcatgttctgccataattatctgttcatgtattgtagaatttttcaaaagcaaacactatgttttactcgttgtatagcacagtgcctgatgcataggagatcctgaagtggggggtatggagggagacattgaccttgagagaagccttctgttccctccaactggcttcttcaggcaagtttaaagaccaaatcgggttgggcaaatagatggttaaccagtgtgttcctgaagacacgccgaaacgaggacttccttgctcttcccatagttttactaccatgacagtccatttctaactgcaatttaatttgtatcttaccaatatgacatgctagtgctgttccttctgctttaactgagcctatgtatcacccagtgcctctcaagcaattgttttttataagtcataaaggctcttgacttaaactttggtatgtgcgagttgagtgatacaaacacacagtatttcacttgaggtcagaacacagcccagcacagatttaaaaagaaaaaaatgaacatgttttacagctaaaatgatgggatataaatccttgtcctatcatttattagctctgggactgtggctagattacttgatttctataaagctccaatatctcatctgtaaagtgggactattggcttacataagtatcatgttaaattgagatggcatgtcgaatttagagcatgccatgtagcacagttctttcttgagctgcaagatcttgtgcttgcagtggaaaataaagtgatggcatattggacaggggaggttacactttggtgacaaatagatcagccacgcaattgcattaaaaaagttatttcttgctcatgtaacagactagtgattacttgttacgtatctactatgtgtgccaggtcccgcactaggcactgtaggtatggtcttgaacaagacaggcaaaaatctcacagtgcttctaaagatgggcttcgtgggagaaaaggctgattatgtttgcacccactgcaagttaaggtgtacgactatcaacagcagcatcttgaagtcatgaatgtgtgtaccgtctgaattatctgaatgttggatccctgcctggttgggtgcaggagcctgggagaagagatgcttcttttgagcacggagctcagaaatgtggcaaaggctgaaactactgatgaaggacaaggtcttggaataatgtattgtttcaaaccttgatgcacaaattctctacttcatgagcgattctagcgtaaagcaggcatgctttctctagaaatgcctccctccaaccaaaaaaccccaaagtgaaaaagaagaaaaactgagaacaccagaggccttaaattcttatgaagtatgagttttaatgcatgcatccaatcagcccaggctgaagtgttgacattggatttatttgcatgacttaatagcttatttcacaacccactcaaaagctccttttccctttgagttctgattgttttgttatagtccctgtggatacaattcacatcagcactgggtttactatatattccccctttgcctttctctctcttaagtgtgttagtccttcccacctaatgacaaaagcagtttcctaagcaactgagcaccagaatgtgttaaaaaaaaaaatctagatttgtacctttcaaaaaatccacataaagaactgtgatttgctttaaggaaggggcaaatggaaacatggttttaattgagatatggatataatcctgttccagttggtcacagatgatcttttcggccaatttgggactgatgaggaaaagaccacttgggtgcttgttacctgtagaaagtacttttaggggcaccatgagacatggaggcttgcccgggttttcaatcttgactccatcaccaatcattgagtcatctcaagcaagttatttaagctccctgactcccagctttcttgcctctaagatggggataacaattcctatgtttgtgtagctaagagagctcaaatccttaagaaaaatgcagagggttaattctccctacacagtggacacctcattggcatactagctgtgtggatgaaaggttgattctctctagaatttaactgtcagaccatgtaattgtatttttttttttttttggagagtgtctcactctgtcacccaggctggagtccagtggcatgatcatagctccctgtacccttaatctcctgtgctccagcgatcttccctcctcagcctcccagttgtagctatattttaatggcctgattccttttcatcttgacttaattgccaaccactcaagtatttctagagcccatactatgtgactattgctgtacaatgctctggaaagccaaaagtgtgtttgtatagtgaccaccttgcacatgtattttctggagtcttttttttttcacataatgctcagtgcagtcactagtagttgctttaaggaactgtccaaatttcagaatgatatttataaaatgttccatttatgtttgaacactttttggaaataagtgtaatagtaagcatattaaaaattagactggggctgggcacggtagctagtggctgtaatcccagcactttgggaggctgaggcgggcagatcatgaggtcaggagttcgagaccagcctggccattgtaatgtaaaccctgtctctactaaaaatacaaaaaagtagctaggcgtagtcgtgggcacctgtaatcacaggtacttgggaggctgaggtaggcgaattgcttgaatccaggaggtggaggttgtggtgtgtccagatagtgccactgcactccagcctaggtgaccatgtgagactccatctcaaaaaaaaaaaaaaaaaaaaaatcaaaagtagactggaagcataaataccaaactgtgaggagcatttgccccaggaatgaaaggattggtgtgaaaacatcacttgggagttaaatgttttagtctggatacttctgagtggtttgacattttttataaggctatttatatattatttggttttaagaaatcaatacactatttcttttttaacaattttaggtttacagaaaaattgagcaacgagtgcagagtttgcctacgccccaccactcccccagtttcctttataattaacacttgcattagtgtggtatattttttacatttgatgagccaattttgatacactattattaaccaagtctgtaggttatgttatggttcagtctgcattgtacatcctatgggttttgacagctgttgaatgacatgcaaccaccgttatatcattcagaatagttttactgccctaaaaaatctcctatgttctatctagccatccctctttccctccccctcctctgagcccttgcaaaccattgatctttgtattctcttcatagttttttttttttttccaatgtatcccatcactggaatcacacagtatgcagcccttaaaatttggctccttttgcttcgcagtatgcctgtaaagtaactccatgtctttctgtggctcaacagctcatttctttttagtatggctgaataatggtctgcgtataccatgatttgtttattcattcacttactgaaggtcatctcaattacttccaggttttggcaattttgaataaagttactataaacatctgtgtgcaggtttttgtgtagaaataagttttcaactactttgggtaaataccaaggattataattgctggattgtatggtaagagtacgtttcattttgtaaaatattgcgggtcttctgaggttgctatatcattttgcattcccatccacagtgaatgtgagttctgttgccccacatcctcactagcacttggtgttgtcattgttttgaattttcacaattctaataggtacatagtggtatcattgttttaatttgcaatatcctaataatatatgttgagcttcttttcatatgcctgtattccatctgtatgtattttttggtgaggtgtctgttcaagtcttttgcccatttttaaattatttttcttaatgagttttaagactttaaaaaaaatattttggataacagttctttatcatacatgtttcttgcaaatattttctcctagcctttggcttgtctttctcagttgacagtgtcttatattaaggagacgttttcaattttaatgaagtctagcttatcaatgatttctttcatggattgcacctttggtattatatataaaaagtcactttcatgctcaagatcagctgaactttcttgtacattattttctaggagttctatggttttacattttacatttaggtctgtgattcattttgagtcaatttttgtgaatagtgtgaggtctttgtctagattcttttttttttttttttttttttttttgcatgtgggtatccatttgttctagatccatttgtggaaaagactatctgggctttctcttctgtttcactgatgtatttggtggcttttgccaataccacactgtttcaattactatagctttgttgtaactcttgaagtcggatagtgtcagtgctcctactttgttcttctcatttaatattgtcttgcatattctgaatcttttgcttttccatgtacactttagaatcagtttgttaatatccacaaaaaataggttgctgggattttcattttctttgtatttattaggcaaaaatattcctttatttacattttattcacatttagttttttatgcgcacatttaaaggactttattgtaaacaacgacagtgattctagaacggtagatagcttttttaaatgtaattactcttgtaagaggaaaaaatacatgatactaaaggattgtattttgtgaccacctataatgcaacaaatcatctacttagttgctatgttaatctttgctgctgtaacaaattatcagactcagtggcttcaaacaacacaaatttatcatcctgtggttctgtaggacagaagtatgatactgggcccactgggctgaaaaggtaccagccgtactgcattcctttttggggcctttaggggagattctgtttcattggcttttcagttttctttgtggccccctgcattctttggcttatggtcccttccttcttcaaagcctccttttcacctccttcaaagtggtcaagtctgtcttatacagcatcattctgacctcttttgcctccttcttccacttttaaggacccttagcattatattaggtccactcagatgattcaaggtcatctcaaggcccttaacttaatcaaatttcaacttaatcacatttgcaaaatctttttgcataacatattcgcagcttcttcaaattaaaacgttgacatctctaggtgtggccatgattctgcctgccacagtagaacttgttttcaaagtaatcaggttttgccctcagcaaattaacgcaggaacggaaaaccaagcaccacatgttctcacttacaacagggagctgaataatgagcacacgtcaacacatggagggaacaacacacactggggcctgttggaggggtgctgctgggagggagagcataaggaagagtaactaatggatgctgggcttaatacctaggtgatgggatgatctgtgtagcaaatcaccatggcactaccatctctacagcagcacagcctgtatcaaataatggtatgttggagtaattcaaactggaaaataggtagctaggaggactgcacctgagcatatcaaccatgagtttccataaacctgtaaaacaaaatagccaaagaattattacatatatatatctgtggttaagaaatcatacccctcctttttgaaaggcccaaattcaaaatgaaaagataccactacattatatgactggctttcaaaaattccccagtgttctgcttaactttttaaatttactttgtatcttttttttttaactccagagtagaagagtgatgcttgatgtcctcaagttacagccagcatttactaattctttgatttgactttataaagtacttatgcttgaatccagaacccaaggatttttcagttatcacaaattactttcacagaaggctaatttattattctatgagacaatccattagattggtgcaaaagtaactatggtttttgcccaaaaaccatagttacttttgcaccaagctaaaatattcttctcactaaactttttctctgccaaaagatcacatctggataactttttttccccacatctggataacttaaggcaagcttttgtacctcttcttcagtacctcagagagaaaacagcttctgtttgatatttgtgtagtttgttttggcatagtcattggaaaggtctaggattttggttcctggaccacatattaaaatagcaattccctactgttcaaattgaaacttgcctgtaaaaattcaatgttagtttttacctgcttggtaccctgaattaagatgaaagggttttaaaaaatcatctttcttacaaaatctgtgggatcattgtgacccaatgaaaaatatacttcctgcaaaactttaaccatctgtttattcagatcgagactattggaaaaggtacaagggacattggtcaacaatcaacaaaggcatttacaggtaaatccagctgagtagaggaactcatagaatccctaagtttaggttttcatgggacaaaagaaagcattcaggagaatggcccaaaatatttacagtatcaagatctgatatcataatccttcatagatcccattgttttgaaagacgttcaagagtgtgtgttatagcttttagttattttgatatgatgctaacaatcacttctttgctagctcctttggaacgaagaaacatcttcaggtcctgctcattgggaacattctgttaaaaactccaggctgtcgtttctttgccatgtcagtatccacttccatagtaagttattcagtggttcctcattctccaaagctcattgtctgcatcgtttcacttcacaccaaaaagcctaagtgaaactgatttgaagagcatttctgctgaaaatcaggtcatccaacattttgaattaaagtgaaagttctcatataccagagatttcttggtgccataatagtcaggtagcccaaacctttcggaatgctgtgtgccgtagatggcttttactttggcttgggatttttaaaactgaggttgcattgaatctataggtcaagttgagaagaactgatatcttgacaatattgagatttcctgtctgcgtatgtggatagctttcctttttcttagatcttttgtatttctttcagcaaagttttatagttttccttatatagatctttcacgtttgatttatacctaagtatttaaatttttggcattaatgtaaatggtattgtgtttttaatttcaagtcccaattgttcattgctagcaataagaagacaattgactttgtatattaacttttgtcccacaagcttgctatgattgcttattagttctagaagtgtattacttgtataattaaaaaaattttaaaaaagaatcaaagagtatggaggagaaactttcagcacacctgtgcacatcataatcattaaaatgtgatgaaatatgttgacaccaggtgttgcttttgtgaatttcctgtagtggcttagaatcacttttgcttatattttcaaatgtgaagatttgtataataaattaaactgaacaaacaagaaaacatctggggtgagtttttgtaacaggtgttgtgtaaataggtcttgtggatatccaaacaggtgacactacctaaaatatacacacatgttggactcaacatgcacagaaacaaagcatgtggaatagaagaacctagacaatggtagtcccaagaattgtgacctaatgacaagtgatattactgacaagggtgttaataactcatagacagatcagagtttcgataaggaaagcagggacatctctcaatgtacagcaatgaggaagacttcatttgtgcacatttgtctgacttccaaagaacagtttctttatctctttttcttccacatctcactctattcttattggtaaacttcactcgaaccatccagggaagagtattctgggaaatgtagttcttgccatcagctttgcaatgcagagagcttagatggagccttatcttatgtaatcatattttatttgaataagacttctacaaaatgtctttttctcctactggattacaagtttcttaaaggttaagattgtttcttttatgtctgaatatatcttgcagcatctggcagagggttgtacacatagtaggtattactcaaatatttgcttaataaattaatggatgatattacttaaagtactgttatgatcaatgtaagttaccgcataggtgaattggaccatcactttgctctgacgaatggctgtaactaaaatgaatagccaatttaaatttctgatttattaaggcctttttactgctgttcttttactgtaatactctggtggtttgcactggtcattaacttcagtctagagtattgagatgttagtgaagagttggtacattcagcccacggaatcacgtttcctacatgatcatagctggtatgtctgagagcagttgaatagctcctctaatgattgtagaacactagagtgaatgacaaattattggtgtctgatattatatgattggtaaacaaccattatgcactttgtttccatccctccaggaaagctagattatccccagatagtagattgctgtgtggaaatgccaatatttgctccctgttaatccaaggtaacaattcaagaacggtcatttgatataagaaatttttactgtaatcccagcactttgggaggccaaggcaggcagatcacgaggtcaagagatcaagaccattctggccaacatggtgaaaccctgtctctactaatagtacaaaaattagccgggcgtggttgtgggcgcctgtagtcccagctacccgggagactgaggcaggagaattgcttgaacctgggaggcggaggttgtagtgagccgagatcatgccactgcactccagtctggcgacagagcagggctccatctcaaaaaacaaaaaaaaaacaaaaaaaaaacaaaaaaaaaacaacttttgcaattttttacaaatcgatggctagttaagaatgactctaccaggcaccctgttacgatggggttcaccttcaggtccagtaggatgggtttaataaataatttctatgctgtcaatccactgtaatgtccaaatagaatacacattttttggcacccaaatagacttaggatttatttatttattaattttttttgaggtgttttgttcttgtccaggctggagtgcaatgacgtgatcgatctcgtctcactgcaacctctgcctcccgggttcaagcaattctcctgacttaggcttctgagtagttgggattagaggcatctgccaccatgcccagataatttgtgtatttttattagagatggagttttgccatgttggccaggctggtctcaaactcctgacctcaggtcatccatccacctccaaagtgctgggattgtaggtgtgagccaccacactgggctggtttaggttattcttaagtcttagaacatgaattctgtgcttccagagcgatattaagcaaaaccaagaaatatctactcatttctgtacatggtgctgccatttaactggcatacctcttttcttttgtgtcaggtgttacaaaggcatagttcatcactttggtttttactctcattctcagtgggcacctacttcctaatatccatcttcaggtctgtgtccagtcatggctgcttattaatgctgccactttgcttgccttgtatttctctttctccacccacccacaacctgtatcacttcatgtttcatgctgttctctgctctgttgattttctgccaagcttattttgacagtgttcctggactttgttgatcctgttgagctgatatactcttttcacctctgcttcctacttcattgatttcttctcttgggtacctgagcccttacctctgctgtgtagcatccaggagtctcaagccccactttgtccctccaagacacctgtgtgatatgttgcatggggagaagctactagtagccccttagcccttataagctcttaaaggccaaggagctagtgagcagggttgtctaaagcttagacaaaggagaatgagagaaaaagggaaatgtaggaatgactgaaaaagaaagaaatggaagttaaagaaaaggaagtagggagagaaagatgaaggaatataaagggagttgaaaatggagcatataggaaggagggaagggctggagggaggagaaaagaaagatataagcagaaaagataatccaggctccatgcaaaaggtactcttcattcaggagctagggttttcatgttaacttgctaaaccctgagcttcactcactttgtatcattgtgcttttggactccactctttagatccttttgtctaccttactccccagcccatctctcactgcactgccacacttacctttcctgtgtatcaccaggccatccctccctgcctcagcagtggtggctctcttagtttctgtctcactccatgttcccagacaggtctcagggttgtactcattcagtgaagtgagacttggaaatgccacaaattttggccagaactcaacctgaagacccttctgacctgtaagtatccttgagagttcataaggaaggagggggcagaggaagaaaaagtcaagcattagagtgatgaaaaagaaacttctggagagtttcaagcttgaaatcccctactaatattcagaggcatgttcctgcaggcaagatccctttctattttatttaaataatgacactgtgacattcttggctgttaatcctctaaatggcagtcagggtaacagtcaaagtcataaagccagggattccaaataccttttatcattcatgccaaatatgattcgttgctggcagttacctgagatactgcattgagagccatttgaaggctgtgtatagacatagtgggaaggattctgttattgattaataatgtctgccacagcctgaggagatgggagtggtggtctgtgtggcatgcatttgtttatctagtctcaaagttcttataagagcattttctgttcttacagatagatcttttacagagttatctagccagagatgaatgatatcccttcttttaaaaattctgaaatttaactaacttttaccaccacttcaatttattttcttcagacttggaatgggtgacctggctataagaagggcacaaatgtttttaagcaatagatataccttttcccctaaattgaaaagtatccaataaccaaatatttatactctgctgctaaagccaggcatagatttcctgataatagtgtaaaagagtatttttgttttgctttttgttttaacaaggtcaagtatcttttgtggagtaatctagttggtactaattggagaaagtgagaagattcctttagcttctataatagatatatatttgctatgatgattcatatatgtatatccatagagtctcagagttgggaggcaatttagatggctctcaatttgtgtgatttgggaaatggagatcagagaatatgtgacttattgagagtttcacagttagctcatgactcatttttcttttgtataaagagttgacccttctctttgaccacttcactaaaggccatggagagcccccctaggatgccagtcagggaggtagccccaggtttgggtaagaagtcaggataggcaggtattatttctgggccagttcagtgattgagcatcattaggtagagcaggtgagggctaggtgaggaatgggacatcctgctgagagttttgaagctgagcagaacagtgacagtatcaggaccctctgcaggagcaaagtaagggggccctacatgactgcctagaacagagccaaaatgtcctcccagctgctctgtacacacacaggtagttttcactaacctccatatctgtgacatgtgggtagaacaagtttaaaggtttaggacaagtatgaaatcaaactactggatagttcctcctacgagggcatcttttgttagccatcttatcctgttattgggtcacagtagttcagtgacagaggtagtgatactcaggtagatttttggacctggtctagtatagagccgagcgttagaaagtccttgtcctacactacataaaaatcatcacagatggcaaaatactatgtaaacaacacgtattgctctcatgctgatgaggaacaatggtttctttccatacctttataaggaaaggcttggactaaggggccttcccttccttaacccgtttatgccagaggtttcagttttttgaatttttgcatgagtgaaaaatcagaccttggtgatgaccttgagctgtaggttataaataactcccacatgcttagcgttcctataatggaacactaggcattaatgtcctgccatatatttctgtgatacttggctcgatgttagctttaccataaacatctacctaggaatgttttgttaaaaggcaaatctaatcctctttttcattggaccaactggactttgtgttgcaaactggaccttcagtgttgtgttccaggtttctagcccatgcttggcacccccatcagtacccaataaacatttgttaaataaatgaatctcagcaggatgagaagacaactatgagatgagccacaattactgggctaaatgagcctgagatcacagtagccaaaggaacagctggaccccttggctagagccttatggtgttgtctcatttaatcctcacactaatatcagagtagctgtgatgactcctattttacagatgaggaaattgaggcttaagagtacatggcctgatgtcattcagggagtatgtaaaagctgggactggagccagggtcggcctgctgctaagcccttcttctcatcattgcaccatgcctcctcccaagagaaaagcaaagctctccagactggcgtagggtgagagcattgtgttcttgcataactgaaatgacaggaaagagcaaaagagagcttccagtaaattacatcttaaaaatgtgcagcgatctaaaagagcagccgcaaggtgttttgatattattaatattttttcgaagtttgctgtagttgtctgagtcctttcaggcaggcagtatgtgggtacttaataatttttcatgttggttctgtgactgtccctaatagttctctcaagaagctgaaataaggtcaagttgttcaaatacttacatagggctttggaacctatcgcacccatgttcaaagcccctaaaacacttagagttttattaatgctggtatgcttcattctctggggaattgcgtagaaactctagcatgaaactacattcagggtgatcatatcagatgcttttttgtgcatgaatttgttctgtttctatttctgtattctgtagaattaaaccctaatatcattaattaatagaaacaatgtcagtaattgaagcactgtataaatatttaaatcaatcacaagattgtttggcaaatgaaggtgggtacatctggaaacttatcacataacttacccttggcaataaaaaggcattttttaactcttcccactatgcaagtgcacagcaatggtttaatacaaacaaattaggaggggagtggaagtgagtataattttgacacaagcagaataaaactcatatgcataaatataataataatgtagtttatttactgtgtggtctctagctacagctgcattctagctgccttgtaataaaattaaagcaaccgattaaataccgattagctggttagagacagatcagattatagcaccaattaaaatcagtgtagaacaatgtattcaatcagtctaatctttcttctgtaaacaaagtcttgttgtaataaactttattttatgcatgtgctttgggtatgcagtatattgttgagatagcaggaactccggattgatagaaggaagattagaagttttactctgcttggcacctaagaaatcagacctttgaggcacattccaggaacaaagacatcatgaagaagggtgcccagatggaaaggctatttgagagttagggtggtacttgcctaagcctagtggataaaacaatgaagaatgcttttccataagaagcaaaaggctaagggctgggcgcggtggctcatgcctgtaattccagcactgtgggaggccgaggtgggtgagtcacaaggtcaggagttcaagaccagtctaaccaacatggttagaccccatctgtactaaaaatacaaaaatttagctgggtgtggtggcacacacctgtaatcccagctactcaggaggctgaggcaggagaatcacttgaacccgagaggcggagattgcagtgagctgagatggcgccactgcactccagcctgggcgacacagctagactcagtctcaaaaaaaaaataaataaaaaaggaagcaaaaggctgaactctgtgcagaagggaataggcagccttagacagtaccagaataaaggcaatgctggcagatttgttggatggacatacttatgcctcccatacatgagaaagacttgagttcatgcagctgtcaggtggaatgctattttcttttgagacagtttggaagcaacaggagtcatgcatcaatccccaaagtggcatgaaaatgatccatgtccattcagagtaggaacagcagaaaatctaccagaagtctccaggacatttatatactttttttttttttttccaaattgtgcgtgaccagcatatgcattaatatatttaatatttatttgaatcaactgacttttaaaacataaatttgtttttaagggaaactctgccaccgttttaagtaggaaatcatgttacctattatgaagagaagggaaacacaaaaatactcaatgagaagaaattgttacagactaattcaagatagttatttcctgataatgactaggtctctctctttacatgactttgactgacttgcaaaaccaaataacgatgttcataatttaggatttattttttcttttgtatttattattcctaaaatatattcctaaaaacaaagtctagattgtggcattgggatgaagggggaccttgcagtattgttgtaatgatattgggcccagttcctgtttgacccaactcctttttttcctggggggaaaaaaaataaaggaggctaaataaaagctaagtcaactttcgttattagctgggtctttggaccttctgcacccatgtagcaccccagagagctggactgaacctctggtgaacacttatgtacatattaaagtagcttcaggggcctggatctagagcagttgatccatttctcttcaactgtaattgagtgtcatatatcatctgagcagtggaaggggagaacagtccagaacacccatagcacctgaggaaacagctagagaatgagagtgtttgtgtttacccccgctgattctggtctagaataattggctcaggcctactcaggctgggatgttaccttcagagctggtggccactagaaatgaagaggaaagagagagagaaaggagagaaaattagatagggaaagaaagagggtgagagtgagagtcttgtcctctgcgtgagcagacgagggaagatggacattacagtgtacacccctgagggctccatcagaaagaggcagagtgctccagatggagctgctgcttctctggaatgggagaagtacctgcccttaatcctcactcattgagagaagatataaggcaagtgggagcagggaggagaagacttgagtttcagcaagtaaggggcttgagtattaggtaagaagtgccaaagggaatagacactattctccattcatcctttttatttcccctctgattttcacagcaagccaagtttctggcctacttctcaagaatatgaatatatatacatatatgtttatatgtgtgtatatatgtatatgtgtgtatatatgtatatgtatgtattgcagacaaaagttttcctaaattagtgaaattagtacaaaatgaaaaccttgttaggatgtcagagaagagggaataattgaagggagaaatgacttggaattgtttgcaaatgttgaagacacatctatcacgcatgtggtgtgggaaattgtgatactagaaacgtgaactcagtacacaatgaatgttcaacacctctgctacctcaatcagaaagaatctgtctcaccctgatgagttgctctgaaaataaccaccaattaccccaacttcagtagggaagataatatacttttaattagtggcagactagatagaaatataaatccttatcatcctaaaaaagaattctaccatttgccaacccttgcaagtaataaacatgaaagtgccctcttcgaaagaggcccaccgaggaagtgactgtttagttccctgagaccatctgaaaatgattaatctgctcatcggcaattcaaagcttctatttctgtggtgtctgaaaatttatattattctagaagatttataaaaaccctggtggttttcagctgggagaagggctttagtggtgtggttatcaatgattatttgcccttccttggatactatagtgactgccatatggaagagggactaaaatttattctttctaattcctgatgacagacactagtaatagagaacccggctttagcttgaattaacaacttttgaaacaaatatagaggtccagtaatggaatgagcagcctctcaatgtagtaatattcccattaatggaaggattcaagcagaatcagagttccagtggaagcaggtaacagagactgaggttaatataagtagaaaaggaatttgttacaaatagaaggatatcggggagttaacagaatcaagatgcgggcaggagggactaggcttagaaacaggaaagtatcaagatggagtctacttggctattaagaagccattacagcaatgagtgagtgagtggcatgtcactcttcttaggattcagagccctggaagagaaggtccaattaactgagcttaggacacatgctcatcctttttccattacagcagaaaatataccagaagtctccaggacctcaaattctggagtggaatgaaaaggcacccaattcactatcctaatggtggcttataataggagaaaagtccctaaaagtgaatcaagatgctatcacaggctgggctcggtgactcacgcctgtaatcccagcactttgggaggctgaggcgggcagattgcctgaactcaggagtttgagaccagcctgggtaacatggtgaaaccccatctctactaaaacacaaaaaattacctgggcatggcagtgggcatctgtagtcccagctacttgggaggctgaggcatgagaatcacttgaatccgggaggcagaggttgcagtgagctaagattgcgtcactgcactccagcctgggtgacagaacgagactccatctcaaaaaaaaaaaaaatgctattacaatgagggaatagggactgaggaaccaaaactgaacaagtgatgtttgctatagtaaacatccattaggaatattgtagaggaggattctttgttgggtaggaagttagggagaaagagttggtccctctggctctagcacactctggggcaagaagaatgtcatccttgagagattaggaatttagcatccttaaaagtagtcaggcagacttgggcgagataacatcccctggtttctataattgtgtctatgatcagcttctctttgaaggttttcatctgtgacagagcagtcagatactatagtgtttttatatactatttacagatacatataggacattcacatgttcaaagtttgagaattccttataactttatctttcctcctctcccatcccctgtgatggtcagtttctaaaccctacttcaggtatccttctcaaaactctcataggcaagaaccaggtgccccattagctgtgttcccacagcacctcctgtccgtacctctagcagaaaataaagcaaaatagtatatgatgttagttgtttccattactggattgagaagaactcctggatgcaaggaccttgtgtttaattgctgtagttttagcctgcagcacacagaccaaggagataaacaaatgaatgaaaagacataggaagaaatggaatgaatacattgaaatataaataaatggtagaggtctttcagggttcttttctaaactggtgccttctcaaactgacttctcaagtatgtcctaatccgtacacttctttgtcctaagcggagtgaatatttgatctcttggtatctgtcaggtggaacctttctctggaaagctaaaagcattttactctattgatgtgttctcaccagagctgagccatgagtagttaagtaggcatttgtttctattatgactgcaaatagtatgatttcaaatcacttttattgcagtgatttgaagggattacacctttaatttgcaaagcagtaccctagaactgaaccaaaccaaagctgtggctatactaagttattgcctaagctttcagttcatggacattagtattggggaaaatcaactgcatctctctctctctctctctgtgtgtgtgtgtttgagtatagaatcctcaacttagttgtgaacaaaggtacatacttaagcatagaaatcctaattttaaaaaatgtgaatggtttagacatgagagaaatcacaatcacagagaggggagcctgaatgaagtcagaaagctcttgtgttaaaatggaccttgggcaggttactgatcccttcaatgctgctcctccctgtccattgtgaaatctgtgaaatggggatgatgataacagaatggaatctatagggttgttttgaggattaaatgaacttgctttctctcagtttgcccactattctgaagagatccaagattcctgggcaatagtaagtgagagggaaaatgagcagagatctttttcttcctgtggctgatcacttaggacaccaagagtgggaacctcggtttttttcccatttcatgctccttcctgcatagaaggggagctgatgagtggaatagagctataagaaatgacataatttgttatctgcagtgacctggtcagagctggaagcagaagcaacactcagaatagcaatattcttgagtatgttatttcagcccaaccctttcatacttaaaacctttccttttgggattttatctgcggcaaaaatgcatgtctggctcttcctagatcttatcccaagatggaggtgagctctgtgggtggccccaactctaattactgatttctttgttagcatatgatttgatctcattataatggttgaaatcccatttccacgacaaccagaagctgaccaaggcctttatatcttcttggtcggagtcctgctctaccctggattcccctcacttttgtggtcaaaagtatttaattaattgcgtggttctgccagttttttctctttatgttttctctctacacaaggccagactcacctgtgcactttctctcactgtactaaatgtaaatccttgtatttttaaaagctggccttgatagccttctcttctgctgcacaatgtactcccattgctataagtacttcctactgaagaatgttattgcctgaaaagcacttggagcagtgcctagtacatagtagacactcaacaactctgagctgttcttagtctcttcgtcaccattattattattaccttatagttactgtgagaattaaataacaaaatacctataaagtatggtggcatgcagccgggcacatagcaaatgctcaggaaatgttaggtactgctaattaaaggagcctaagccagagatctatttacaaaaatgaaacagagccttatagtgttattgccttggatacattctactcattcttacgtatcattcacttctagtgtactttgcaatgagggtggatattcacaatgatgccttacccagagaggcactttatgatgttgctcattgaaagaaatacatttatactcactgtgtcagaaaagtggtgttatatttcatgtattcctttttagagtggtgattgtatatttttacaagtgacttatgctcatcattaaaaaatgtaggcaatatacaaaattatacagaagaaagcaacacaataccctaaatcccaccaccgagaaataccctctgaacagttgaagagcatcgttctaaacatctcttaatacacatgtacagataggaagatagtaaaatggatagatagtaagaattaacattgtaaggatgagaataattcagagatcataatatatctgctttatcaataaagatgttaaatttaattttacctgaatttaacagaagaaaaagaaactgaaagtgaaatccaaggaattgttgagcttcagctatgtattttttcaccattaaagctatttgttcctaaagacttttctaaaggttaagaaaaaatataaaaacattcaaaagttggagtttttatgagtttttaactacaccaattttagatgttattcactaggagagattacatgattgatttctaatttctttccagctacctctcttactaccttcaaactatgttgctcatattatttttaccctgacaggctgtcctagtctgtttgggctgctgtagcaaaataccataaactgggtagctcataaacaacagaaatatatttcttgcagttatagagactgggaagtctaagatcaaggtaccggcagatttggtgtctggcaaaggcttgctttctcattagtagatggtactttcttgctattttctcacctagtgcaaggggctattagctagctctctgaggtcttttttatacaggcactaatcccagtcatgagaatggagccctcatgacttccactgcctaatactgtcaccttggaagttaggatttcaacatatgaatttggagaagacataagtattcagtccattgcacaggctcataacatcctcattctgttttgcaaatgtcattctcccatttgtttagtcctggttgtatttttatttggatccagctctggtagtctttttaccatggtttctagatgccaggattgtttctttttatttatctcttagctgggtacctttcatcatcaagcaattttttttctctccaagaaggtttcatgaaggttatattctctgagatttttcacttttgagaatatctacctattacctttatacctgaataacaacttggctgataggacattcttgggtcaccttttctttttctctgaagtttagacattgctccatggttttccgagattggctgttgctgtagaaagtgtgaggccaggctgattttcttttccctattgtaattgacttgctttcttcttagatgtttgaacagctctagttttatccttgatgtgtaatagcttaattaggatgacaatgctgatcattaaatttttctcaggatactgtatcatttccacccatggattcagttctttcttcactttagataaatgttttgtgtgaaaactgagaatttttctttttacggtccagtgtttcagggacactgatgatgattttcttggcttactctatctgtcttccaaattaatgcttactttgtttgcttgaacaagttccttgccttttttctcaggtattcagtgaaattattttgagtttctccatcatggtaatttagttttcagctttgactttttctatttctgtttctaatgaatttattaagtttttattggtatgtaatatattcagagtacttccttaactctggaatttccttttcaaaaccttgtttgtgttttatcttctcaattttgagctgttattgaagattctttttagtttccttaatattataaaacacttatgaggaaactgttgtttaatttcagttacattttcttccagctgagttcttcatctgtcttttacattctgttattttctttctgccattccccaccctctcctcattcaggtagtaagtttgcatggtagtcatgccttttatttttatcctgctcactattaagatgggtgttttatgtttttgttattgttgtttttcttaactggtgtgagttgatcttcatcttccttgatttcaagttccttgacactagtttgtcttccctattctgagctatggtttgagggctagctgctgctttttacatacttttctaaagatgactgattttcagaatgtggtcttcagaccagcaacatcatttaacagggggaatctgtgggcctcacctcatacacattgaatcagaaactctggagatgtggcccagtaacctgttttatcacaaggctttcaggcagctctgaaacatgctgacattaggaagccactgcggtaggaaatgtggagggtgagggtggagaaggctgtggggaagcagggtgcagcccacactgggcgacctgatccctgctgtatcttccgagatcctattaatattctgtccctgggcccattcctcaaccagcattgttgcagtctttgggctttcaaaggttctgtcacttggcacattgctgtggaagtcaacaaactctggggacccttccagcctctgctggcagggctgctgtgaactgctgctgtgtgcaggttgtccttgaatggagaaacataggtgaggggcccggaaggggagctcaattccagtctgtgctctgcctccaaaaaagcatgcttggtgcagggctgttgcatccgctcatgagagggatgcatttttctaatttggtctgcccagagggggcatcttctcataaaaagaacatctataatatgtactgtagtcctgataaggtctcaaaatgacatgtaggagcttctataacaaagttgtttttctcgaatttgtctgggtttgcctcatcactccccttccgtcagtccataccttttcatatttagggtagttctgagaaacttcagaaatctgtctacttaccttctttgattagtaccgcttctgggtgtgtgtagggttggattagggtgagttggtggggctgacttatcagaatctttgttttcttttcttaggctttcaaaatttatagcaaagcttataccactttattggttttataggtgttgggtaaggtattagctttttaaaatccttatcattttcttacttttaaaaattagtttcttgcagggtggaggtggggagtgtgattctgtaatcctgccttactctactattagtttatgacagatgcactatttttttcttactgacacaaatgaaaacaattatttttgctgcttatttttttttaatcaagtaggcttccttgtttgtaagtagcagacccaactttgaataacttatggaaaaaagaggtttgggagagtgttgtgtaggatatggaattaaagaacaagtcccagagaagagctggtcattggtgcctttagcaggatggatctgtggatattgggaaggccatggccatgagattactgagctctaagtgccttctgggcatatgatgtgaatggcagccctaccagtacagtgaggaagtggctgcttccttaaagttgtgtttctcaaaagggagtgattttatatctcccctttccccatctgaacacatttagcgacatctggatacatttttggttgtcactactgggaaggagatgctgctggcatctagtaagtagtggccataaatatcttagagtacacagacagctcttcacagcaaagaattatgtggtctaaaatgtcaatagtgctgaggtcaagaactcctgccctaaagaaagggagtttagatgggcaagaacgatagctgttcattattatacttctcaggcagtaggtgagcattctcattgatgtgggacagtgtgtatgtgctggtaccattaggacttctggtagtattgcattccttttttttttttttttaacttgtcctttttagcattttacttccttgggagtacagttgtgatattgtcttactgttgtaccaacatgcagaagtcaattttaattcactaatgaaagccatgttaatcttccccacaatggttaagtttataactgtgatgatgtttctgatatttgactccgacttaatagtcaccttaggaaatatagaaaacattgatttggtaacaaataaaaattttagatccgtactcaaagtatcttatctttgagcctcacatccttcatgcaaaactcactggtaagaactaccttttgttttcttaattctattgatatttgcaggtgaccacattgtttgtcactggccaattgactgtgactgtggatatatcacctaatctctctagactgcagtttcaacagcaggtatatttttaaatgagtttggaagaatagtgagcccctttgtgttctaacacaataaaattatagacaatgcaagttattacagagtatatgagctctcccttctgtaagatcgaggattgggcaggtttctgatctggcgggatcaagtttttggtaggcaccccagtaccaatcttcctgtaacttttcttttgctagtatgcccacagcaagatacaatggaacactgcacattaatacattttaacagattttaaacgaactttctctaaacagatagaagaaaattagaacattcctagggaaatcccttggcagacagcacatctgtcagtgatttggcattgctagaacactttcaccagactgcatcagcagtttttctcaaaatgtgaacagtatgtttgctaaaagcaaacacagtcatgtctgaattgcacaaacttctctcaaatacaagggaatgtcactgtctacactgtaatccctcaaattatcctaaccacaagttcttgggaaaaaaatccaccaaactcagaagcggtatctgaaaaagccatttcatactatagaagtttctgcaatctgtaagcaaagcgaaatttgactgttttttggtgctgataatatgcgaggatgtttatctttattacttgctagcagtgtgatatatcattatataaacttgcttttacttctaattaaacttttaaaatgcagttgcttttctttgctcttgcaacaacatggaagattaagtgatttttgttgcccagtggaattatctatcctcaaaaactcaacacaaattaattgctgttggtgaaatacattttaaaatattataaccctattcattttaggaaaattaatactccttgtgagcaaatattttaaccaaaatatggtaagtttattaataattctgagaggagagaaaacacagcttgaaaaatagtcaacattttgcttgatcgctacctttcctgctaattattttgagggatttttaaagcaaagaacacatttattcagctgtatccattaatctggaaaatgccctctctttaaattgtccccccaaatcttgtttctgaatattaagttgcctatgtgctctccaatatgaaggctggaattaaattgctgctatctaacttcgatggtgggtgcttaggatgatacatctttccagacctttttatactttcaagatgaaagaatatgatctaaacctccttcgctcaaatgccaattcctcaatgtatgattcttcttggctttcctgaagccaagagctgtcaacattcttttatttggtatctctctgatgttgcttatttctttgtatctggcaatctacttttgttgttcttcctctaacttactagacagagagtcctggctcaatatctctcagctgcttagcttctctgcatacaaattgcatagcttggtcattttgaactttaaaacagggtttcagataaagcaagaagaattaggtttagttaggttgataagatcggcttttaaacagtttgatgaactcccatttagactttattagaagaggagcctgagttaccctcccatgttcacacttgagggtcttaattccctgacatttccttggcattagagactgagacttagacttcactgtcatttgggtcctcctagagactgaactagagcttttcatgaagagctggatggtttctttgcatggtgattattttcttacatgagtcttttggagaatggtatggatatgaatgacagcgggtaagaactgagtctgaaaaactacagttcaaggtatggttctgctgctttctaggtgcaagaagaaagctcttagatctatatgagcccctggttttaaaatctataaaataacaatgctgctctcctaagtatgtataatgattaaacatttactgcttgttagctgctgtaaaacaattttatagcaaaagttctcactattattggaaatcgatgaaaaggtttagggctctagggaggcagggttttgaaaaaaatctcttctcccccatgttaatgttgggtgagtttgacttaattattttctgtacactttctcctcccccaaccattatcttaatatttattcccattttcttatggaataaataggcatactttaattctgcaagcctccgttgtccataagcacaggaaatgaggtggggatggtgctgtgtaaaataatttgggaagcagtatgtctgcacaaaacagaataccagaggtctctgataaatttcagttttggtgtcatctagatagttcaaagcacattttttttcactaaaatatctgaaatcaaatacagtagaaacagcacagggggacaatactaacatctgtcttcacattattaggttcatttaatttaactctcatctcttgatgatgatggtaagagccagcatgctaggcgttgtattatgagatagaaagtattatcatgctctctataggcagtcacactccagagtctctacctgagatgtgtctagtactattgttagacttggagatataaaggtggatgagatttagccattacccacaaggagcttacagtcccagtgagaagtagaatacaggggtgcagattcctttactatgagactgtgtaggaaattgctgcaggagtgattcaaacaccaagaacagcaaacgggagcctcaatcttgtctgttttggagatccagaaggagatagcaattggaaaggattttggagattaggtcatgtttccattgcagatgagactgagggatgataaaagagggatgggcaggagtgaaagaatgaaaaatagctgagctgaaaaagggtgatcccaaaggctagtgcagtgtcggcaaggccaaggttggagaacttcaaggtggttcaggagagcctgcagcctgtgagtgctgaagaagggcatgaggtttgggctcgaatgaccttggagaggaattctctaagaatggcctagggaagaagccaacactgtatttgactgaggagatagtggagactgggtgtttagtagattattccaagaacttttttggttaattacaggagaaaaagaagttgattatttaaaagttcataatgggtaagtatacttttatttgtaagaaagaagaattaatagagcaataataatggagaaatcagaagggaggcaaaaatggagagaagagagtttttctgagccctagaagaagctggtaagaggtgttttattatactttgcatgggatttggatgttaactatagactgtattgcaaaggaaaatatattatgggaccaggcatggtggctcacacctataattcccgtgctgtgggaggatctcttaaggccaggagttcaagaccagcctgggcaacacagcaagaccccatctcttaaaaaaaaattagccaggcatggcggtgcatgcctgtagttacagctacttaggaggctgaagtaggagaataacttgagcccaggagtttgaggcttcagtgagctataactgcacgacggcactggcaacaggagtgacacctagtctcttaaaatacacacatacacacactatacacacacacacacatatatatatacacacatatatctacacgtatatacacatacgtatgtgcgtatatatatatacacatatgtccatatatacacacacatatatatgtgtgtgtgtccatatatatatacacacacacacatatatacatatttatatgtatatgtatatatttaggacagaaatgcttggtgatcctccatgttctttccctttaatacatggctcactgcaatttacaggagccaagtataaaaaaaaaaaagactaacatggtgtcctcaggcttaatcctgtacaattgccttctgcctactgatgtttcgctttcccctaatttctcctcgttggctctcctttgtccatcctactttcttgatgcctgccactctgacccctgaattggttgctattggctcctagcttttttctctgttctctttgcatccaaatctagactgttcaactttggcttgaaatgtaatgcagatgaatcaatctgtaatgctcccttttcttggtgaggccagactgttgcttctttatatcctgtcctcacagtagctccactgtgcttggccaggtagacgccttgggactgtttctgtgctgtcccagtggcatgtgaggaacacagcaagggatacaacaggtggaaacaaaaggtccaggaagaaggaatagaaataatgaggaaagaatacagttggaaggactggcctcaaataggggagaaacagttcatctacagaaacacagcccttggaagcagggaaggatgaagatgctgcaggatggagaagggaaaagttaaggaactcctagcagagggcccaggcaggatagaaggcccccagggagaaccagatatgggggaaaaagcaatgcaaatgagaagaagcagaggctattctgggctttctagaacaagggtggcagccatcatcacatgtggctggtgaagactcaaaaggaagtaggggaatagaaaaccctttatagtgttggaaggggagaggagagggaagggaggaggaggattcaggtgtgacctgacttgaggctgttggcacaggaagctggaggtggctaacctagaagccagatgtcctatgtgatcagagtcagctttcactggttggtcctgtgttggatgcagggggcaacacttggggaagttggcagttgttgattaagtaccaaccatttggggccgatggctgcaaaagttgtggtttcctcgactggtttctgcaggtggtgggtcagtgttctatttttctatatagtctggacactgtccattgaatgttcagcttcccatgggctagagttacaatggttgtgttcactgtatgtgtgtactatatttcttaggacatgctttgacttgcggcctggccagatttgagttacaacagagctccgtgcgattccagctggcagtttgccagtgtactgtttccacagactttcacacatcctccttcagtgacttctatacagaaaactggaaacaatatttttataggtgttaacttttctggaaacattaaaagtaacactcaaaatgcttttcttttgtgtttactcaaatatagttctcaacgcagctctggctttcagagaagcctaattactttcatataccatgagaagtcgatagagcattgggaaaagttatacctataaatttatattacttgagggagaatatttggtcttagaaatattaatgcagcctcccatctcataggaattagttttttttgtgaaatagaatttgattgactttctgacccaccaagcatgtggcaggggagaaatgtttttccacattggctgtctctgagttcttaattctaaagatgtcagcttggagaaagggcaatttgttcctaaaagagctgtacctgcatatctgtctgctttgttcataggagagatcaatagaatggaggaacagatagtcagacatagtgtcagacaattatttggaggtggcagccatttgcagttaacatacgactataacatactccaagaatattttcttctaaatcattaagctagttattatttgcattgagcagcaaaagttgaaagttgccaatgtagaaagctaaaatagagaacccaggggcagggggtgaaatcctggctgtgaatgtttttcaacactaatttcaagcctgttattgtcctgatagaaaccccaaatacctttcttcagtgatatgcatgcaagtgtaaattaatgtgccagagaaaattattatagagaagtgtcaggtcacctgggctagtgctattctttgtaatattatacaatatcaatctacagtaatacttttttgcaggctagttggaggacaaaaaaggatctcctgtccttattccttatcaaaagcagtcttgtatgtggtgttaagggtacaaagtgagagagtataactaagtttaaccaatagaagattacatactcagaatgtatgttctagtcaaaatgaaagtgtgggctctgcccactgaatgaaagcccacattttccccctagatgttggagaaaggtcttcaggatacccagcgatgggcaggcttctctttatgcctgtctgtgccatcaatttgaggtcaagctttgctattgctgctgttgacttctttcaagccaggcacagccactgggacctttgctataaccatcaagacagtgctatatcccaggcacaggaacccactgtaaatcttgctagatgaggggctagaagagaggacaagatctcacggaggctctactcactctctccagactcaggctactttcctactacctctgacgcttacctttcttgaataatccagctctgtttcttctgggagcctgcacaactgcctagaggaaggattacatttctaaccttccttgtttctaggtggggttgtataatcaaattctgacaagtgacaatgagaagtgatgggcgcaacttctggaacatgtcattaaagattggaagcctgccctgcctccatcctgctgcccaggcagtgaatggcatggctggaatgccatcttgggctaggagaataagaaccatcacagaggtggtagaagagaatctgaaagcagcctgggttttagatgaccacggtgccagtggccagacaagttctggtctgctggtcctcagacttacatgagcaaattagaccatgtctgcttaagccattgttatttttgtctgttgcagataggtatacctgatttctaacaaatagactagatacatattttttattcgcatctcctttagtattctcagtaaattatcatggtgtatctatgattttatatatatatatatatagagagagagtatatatagtatatatatggaatatatatagtatatatatatatagaggttacatatagagaatatatagagagataatatatatataataatatatatattctacctaattttgatacaatgtggagttcaaaatgtcttaagaatacatatagcttctaatttgatgattattttgttaagataaatcactttaacagcttttcattaaagggtagttttgaaatccgattttctgtttcttttttccccaccttaaattctgaaacacactggaagctgttctgactggcacatagaccatgtaacccaaattaatccctgttaattcattttggtatggtcggggtaaatgctccccgaactctctcttctcccaaagccacatgatttgtgggactttgggaagtgtgtactgtaaggtagagccagacaattctcctccaaatagcctaagttagagtgtgtcaaaacggaataatttctgtatggaaagcaccctcttctgccgtgtatttgaacgaacaaactaaagaatgaatctcagaaggctcatttcattttcctctctgccattttcatcttgtttcatagtgtaacatatggaagagctactaactttagtcttccacgacatggggagggcctgatgaatgtacctggattttgaattgttttcctataaggattcagcttcatatgctggttattatgtgtgtgttggaattttatagcaagtggatttatacagcctagtggctgtttttccttgttgatattctttggggactttgcttggaactagctcctgctctggggctccttgctgtcaaataatgtaaacaccaaggaaggaaaatacgtctcagtctgttaagtccatcatctttctctaagactatctctcattaggtttggaaatttttgagtaaagagaaggtgggcctccaaactagagggtcatgctgtagtttaatgagagtgagggttattgggaggcaattagggagcaaagtcttctaggatctgttaaatgtccacttggtttttcagagttggtgaaaatgtatttgtaatggaaaatatgttttagtttgtggggtgctatgcttttcctttattcttatcagtgggcttagcttttcagaaagttctttagggattttatgacatgagagctgaacatattctaatcctgggctgactgtatttcaggtagaaactgtactattgctgactttcatggggtttaggtgaacttctatgattaagcaatagtatttccctaattctgtccatttttcccccctggatgaatccttcttggaaatcatatcagtttgcttcctcctggaagccttccctgattccctcaaggcttgatgaggagccctttttctgtaatcctgccatagcctgtgctctgtccctttgcgtttaagtcatcagttcagttggctgtgtcttcctaactcgagtgcagggtctctgcctcattcacacttggagctgtggtgcaacatgtgagtgtggagtaaatatgcgttgaattaatgtatttttctagatggacttattttactaatggaataagattttttaggcatgcacacagaagttgcaaaataaatatttgttgattggctttccagtgcttaagtaattccccgctgcaaggcagccacctctaaaactcattaatggttttggatattatttataacattaaaacagttttctgaaagtgcatatatattatgccctgtttcctcctaagtgcatggactctatgaaaaataaacaatacatcaataacatcctaagaattactggaagaaacagcatgttgtctgttattctctgggggtggagtgtaaaagtggtgggcaaggaggggttctagtttgctgctgtggcgattagtaacagcatttgtagtatgaattttgattaacttttgaatccatgaagcagaccactgagtctgtgagtagatgtcatttgaattagatctttgatgtccgccaaggtggtctgatctgaagcgttccacagagttcctcccttcttgcagacttgagcaagaaaaatttggttcataatatttaaaaaaatttctaattgaattacaattttaaatcgttaacttattagagaaaaattattttgcaatttatttttaaaacttggaagagtaaaattaaaagaggactccttccagcagtcttgtagatgtgtcctctcttggaggcatcactgttcacctgtgttagcaggcccagaaactaaagtttgtaaatttacccagagttgaagagggtcaaggccacagattcatacttacctaatgcataagaagatgataaattagaatgccaatgtattcattctccaggagaaatatagctgccaagttacattcatgtttgctggtcagcactttctccagtaagaagtcgaagtggcaaattaaatcacaatcaaaaatatactgctttggtgaaggtgtgggggaaacaagtagtatcatatactattaatagaagtttaaattgctacaacttcctgggagggaaaatttggcaatatctcaaaagtgcctgtatcctttgcccttgccattttgcttccacagagttatcttaaaaatatatcccccgacgtggacaaagccatatgaagaagagtgttccttatagcatcatttctattagcaaaggattagaaaaagtctaaatgtttattaaagtgaactggtcaaatacatggactgtgatgatgttcaaaagaacgatgtaaatgtgtatgtactgtggagaatggcctccaggatatgttattctgggaaaagtgaaggagagaactgtgtgtataatgggcttcctccctttgtattaacagggaggagttcacacaaatacaagtgattggttctacaaagtgtgtttctgaagtgccagaaagaagtggttgggcctggaaggaaaactcacttttcactccacgtgctttgcatctgtttgaatgtgttgccctgtgcttattaccttgtgcttacattgggttatactttttctctctatatataaaaaggttaatttgacattcaaatagtttctctatttaaatctaaaattagcaccaaggaaggtggtcttgttacataaccctgttgctgagtcacctgtgactccaacgggtgagtcacctgcccggtagaacccataggctccaacgaggagtctttctcaggagaatgtctttattctttcctggactcatgcagtcattgtctcacatatgtgtcatcatcatatttatgaccaatttttcctggagctaaatgctgaattcttaaacttgggaaacttctgacttccataagcaacacatatacaagtcacttcttagggtaaggtgaatctggtgtaaattacaatcaccaggacaggcatgatggctcacacctgtaatcccaacactttgggaagctgaggccaagaggatcacttgagcttgagaggttgaggctgtagtgagccatgatcatgctaccgcactccagcctaggcaacagagcaagaccctgtctcaaaaataaatgaattaaaaaaattatagtcacgagaggagtgtgtgcaaatgcagtcttggatcccaccccagaggttctgaatcagttggtctggagtgggctcagggacccccagcctgagaagattctaatgcagatgatctctatacccttccttccctccttccattcctctctccctccttcgattctttttctccctttctccttcccctctctttctccttcccctctttattttcttctcttcctttgagaattttagagagtggcatttttcacattccgtacttagatttcagtcatttgactgtttgttcttcctttattgaagatatatattttaaagaaatcagtaaattgttagtaacttcatttgttctgtgtcagttgatctttagtggatatagggagaaaagaaaatgaaaatatgatcaagttcagctgccttaagggctgagagaatggcccttccaagtgctcagcttgtaatgagacccagattattatgcataatcatctcagcctaaatccttcttggtccacgtgaatgatggaagatggtaatttgtctctaagagcaaggaagaaagaacatttgagttaagttatggacagctgacctttgtttttaatcacaactgcttttaaatggtaatagctagggaaaaggcatgacagaagagtggtggaagggaaaaaaaaaaggagaaggggcattgcatgatctttggagtcaggcagacttgcctcctgatacagattctaccccagccaggctgtgtgatctttgacatgagacggaacttctctgtgccaagtctgtgaaatcaggataataagacaaccgatgttaccatggtcagaggataaaataaaaatataggcatacagcctagcatagtgcctggcattagcagaagctcaataaatagtggttaattatattaataaagcagcaggtaatggaggtagaaataactacatgggcttgttagtggaactgcgtggcttctaagggccttcatcctcactgtcaggttttacgcctcaactgtagggacaaaagacatttctctaaattcctttctttatcccggtgaatatcaggtgattacttttttctctttttgagttttttttaaattttattttaagttccagcatacaagtaaagaacaagcaggtttgttacatgttacatatgtgtgccatggtggtttactgaacctaccaacccatcatctaggttttaagccctgcatatattagctatttgtcctaatgctctctcttcccttgctccccacccgccaactggccccagtgtgtgatgttcccctcccagtgttcatgtgttctcattgttcagctcccacttatgagtgagaacatgtggtgtctggttttctgttcctgtgttagtttgctgaagatgatggtttccagcttcatccacgtccctgcaaatgacattatctcattccttttttggctgcatagtattccgtggtgtatatatactactttttctttatctagtctgttattgatgggcatttgggttggttccatgattacttttctgatagagagcttagatggaaggaaataattttttaataaatttgtaatcctaggcaggatgtttgaattttttaaaatttttattttaggttcaggggtacaggtgcaggtttgttacataggtaaactcatgtcatgtgggtttattgtacagtttatttcatcacccaggtactaggcatagtacctaatagttattttttttgctcctctttctcctccaaccctctgccctcaagcaggtcccattgtctattgttcgcctctttgtatccatgagttttcatcatttagcacctagttatgagtaagctcatgcagtatttggttttctgttcttgctttggttttctaagtataatggcctccagctctatccacatttctgcaaaagacgtgatcttgttctttttttatggctgcatagtattccatggtgtatatatacaacattttctttattcagtctatcattgctgggcatttaggttgattccatgtctttgcttttgtgaatagtgctgcagtgaacatacttgtgcatgtgtctttatggtagaatgatttatatttctctgggtttatatccagtaaggggatttctgggttgaatgatagttctgtttttacctctttgaatttctaaagtctccagctgacacttctttgctgaaggtgaagctcaggtttttgttgttgtttttatctctaactttaaactttgctggataagagcacatctgtctattttgatgagtcaatgatcaagtcatggaaactatcaaatagactggggggaggttatttcacaggattgctgtcctcctaccctgcttacctttatttattcattttgacaggatctggaaatagatgtaaaagaactcagcagtttctattgctcattttactgcagccagtgtgctcatgtgagagggatctcagatgatttccccctttctctgtggttccacttttggtgcctatatgcaaatctcagctgtgtcttataaaccagcattcttgaaagtgtgcttcatgggatactagtccaatgagattctccatgagaagaaaattcttttgttttaaaatgtatggataatactgtatgttctaatgccctacttggagagttctgatgtacattaatatactaagggctctgagaagtccccaaggagtgaaaacccacatctcccaaatttatccaaatctggaattaaaaaaaatagtaaaacaactgtaataatgcctataatagtgtttcacagaacccactttgggaaatatattttcattgacaatgaaagggtcctaggtaattgattctgtcctatgacttatgaacagatcaagaaggaaaaatagattaccggaaggtgtgtttcaaaaagaaactggagttagaatttacatagtgaaatgttaactttatgttgagttgtgcctttgggtaccaagcctggttgaattggtaggtccactctgttgactcagtattgataggtctttcttgctttcactgcaagattttttaagtcttggaatttcattaaatattttgttgcagaatgtgtaacaagctttggatctgaatgaaaaataacatcatgtgagtctatgaataaataattgaaattgtctatgaataacttaagggtgactaccactacagctttacaatgtaaagagtttcagtaaactctaacaaaatgcacctgtgtctgactccaaaaattgctttctgaagattgtagaggtagatttatttgaatctacgtatctctgattacgcatgaatgtgttgtatcgtttcaggagcattcaagtcctggatatccttttctaaagcttagaaattttcagaattagttataggccactcagcttcagcttactctcacatgaactattgtcatatttattgacaaatagggagggatataatccctttttagatattccagctcacctagtagctataaatgttctcttttattttctaatcttgcagaagtagagggaaaggattgtattaaaatagttttgttgatgcctgaagtgatgcaaaactaagatgaaggcagcaaatgcagaaaaaataaattcaaaatgatttgtttagattaggtttatgggctcatgtagtttagtggagtgagaccaggaaccagaaataatcagagagcctcttgcttaaaaacaaataatatatagttcaggaacattagaacattgctagatattacattgtaaggatcttcattcagtagtagcaaaaataaaaaagggaataggctcatggataattagcatgatgcagaagtgaaaatggcacctcttggatcacagttgtacaatgcagtgcaggactttgtaacttctttccttttgtccatgttagatgaacacataaaattacagaagataattgaagataaaagattctgataaatttctgatcctatgcaaaaatgattgaactccttagtctccagttgaccatatttaatataaaaggggaatgcatttgggattccaaagggagtagtaactcaaggatgatctaaaatggtgattaatcctaaatacatttgtttattacttggggaaattctttcctttccctgaacccacagttactgccaccgccaccgcagctcacaagggttgtatgtgtgtatgtgtaaaacagatctaagaggagtttgtctgttggaaaggggtaatggatagaggtatgctggccaatgtttaacaattgctctcagaggggaaaaaaagcctaatttgtaacacttgtgaatacacatttctgaatttctgtggtgctgatgctcccaccatggccaatttcaggttatcaactcatgtcaactggctcacaaaatgctgaaaaatataatgagttcttctatgagctgataggagatggctctagcacacccctgctaagagctttcttaggtcctggtcattctgtggagctattttctctaaggaactgtacctatacctgtatctgcagctgtgaggagcttggaggctctggagaatgcctttgggaaatgacagccctctgtgaccttctggatcattttcagattccagattctgtaatatttccccaagaagaatatttcccagagtgctgatgtgatttaactgggatacttttactactgagagaatttgtatacaatagcaaaaagtggtttgggggaaggcagctgattctgaaatactagctgatggtatctggggatacatttgctctttgagcatggagccattgctagatatctttgtgacaagacctttgcgttatggcaaatgaatacaggacaccttattcaggacggggattggcaaattaccacctgcccactgaatccaggccacagcatgtttttatgtggctcataagctaaagataacttttacatttttgaatggttgaaaaagaatagaaagaagaataataattggtgacacatgaaaatgatgtgaaactcaagttttagtgaccataaataaagttttattggaatccagtcttgccctttttgttcatatcgtctgtcatctatatcctcacatcatctctggctgctttcatgctacactggcagaattgagtagttgcagccaagaccgtggggcctgaagaacctgaaatatttactatccagctctttacagaaaacgtttgacaacccctgatctaggaaataagtctctgaggaatatgaccagctagtccaaggttctgtacagcggctgaagacatagcaatgggaatgccaaatttatttttaatggattggaaagggtttgcataagaaatgaagaggaaccaaaaacagtttgtgaaaactgttaaaatataaaaccagtaaggagaataaggaatttctcattctgcccgaatcacctcctttcagtttctttcattacctaatgctgtgtaaagagagttttttcctcctgttttcttgtgttgacatgttctgatttagacgcttgtcttacgcatagggaccatgttgcttctcactcaagcagtaaagcggtatcattggtgattgcaagggctggttttgaagtcaggcagatagggttcaagtcctagctcagctacttttttgatatgtggtattggacacatttctttgaacacttctcagctttagttttcttacctataaaatatagatttgttctgagaatcaagtaggatatttaaattgcttagtacaggatctgacacacagtaaacctataataaatgctactttctatttgttgttgttatgtttgtacaccccagggtcttccatatgtggatgtgtttatcttttgggttaagcttttatccttttagttttagcagacagaaataaacctttaatttggcagtatcttcacatagaatacacatttttttttatcccaaatactccatctcccagaaattgtcttgaaatgaaacccatgtgaatgccacagtcttagtcaatattttaaactttggtctgttaagaaggttgtatccgcattcatttcttcccaagaggagactgccctccagtggaaataattctggtaaggggagaaaatgattttcgtagttcagactatctacaaatgttttataaaattttctgttaaaatagacttacttatgaaatttaagcttaacttcaagggagaaagtctttgctgctctctgaatgccaccagtctgctctgacgagggcattcatcaattagacattcatgcctttaatgactagtcgccccccacatgggacaggtatgcctatattcaaatgattctcaaccttggttatacatttaaaaactaagaagcttaaaaatatcctgatgtctcggttgcaccccagtccaaataaatcagaatctctaggggatctaggcatcagtattttttaagtcccctctacacacttgattccaaagtgcagcctccagccaaggttgagaatcactgcttcagacccttaggttttgaagcacacttttgtttttttaaacaaagtaaagcaaaaatcctgccctcacattgcaatggtgtttgctcttcttaagtgtgcatcggtgcagcatccactgtcacctgcttatattgaaatctcatctccagggaaatttactgatccaatcttatttcatttgcttgctaataaagaacttttaggtagtaaaagagtatgatgaaaaaagaatctttgatacttctcccactgtaaatcccactgatggattctgtttgggaccaataatcacttggactttgataacctcatcactaaactctgcagaaacatttgagtttacctgtcaaaaatgcatttacgtaggatgaatttataaaagaatatttttatatatttactcttagccttatgcatatacatgttgcttttattagcctactgttctttgtgtttagttcattatagatatgaatctaatgttttacttaataggaatcactatggttttaccgagattgagacagtggaaggataattaattttgttatctgtaaaacaaaaatattacctacctcctagagttcttaagaaaagtagaggagataatatgtacaaaacagcctagtggctggcactaagtaagcagtctaatgttgttacagtatcaagacagcatatgatagaggtcaagagcaaggtactagaattaagttctctaggttcatctctcatctagactacttgtcagctctgtgatgttagacaaattacttaccctctttaaatctccattttcttacctgaaaacttctaactaccttttgtgggggaggatgagaattacgtatttaatgtgcttgtcagtattcttggcatatgtaagcaccttttcacatacataaagtagaaataatgtgtgtgcgagtgagcaagagagaatgagaggttgagattccatattcattcagagctgcaagggactttgccttgcttcttgtgtactctctaactccgcagcatcagcaccacctggaatcctattagaactatgcaatctcagccaccgccccagacttaatcagaatctgcattttaaaagcttcctggtgatagatgcacatttgagcagccctgttctaatctacaattgccaagtacaggacaaaattgctaccacttcgctgtcatacacccttggcaggcatcactcatcaatcatggcactccatcccaccagcgtcctgcctaattactccagacagcctcaactaattgataggaattgtcatgagaggtgaaacctgtaatggaagaaacttttgtaaggaagaagtgacttacctgagtgacaaaggcagtgcattgccaagacagtactcaaacttgggatttttaatccccagttcagtgatgctgtacattattttatattgccttcaaattccattcagcagcacacaactattgtatagctggctttgtgctacaaccagaaggtgcaaaaaggaaattaatattaaccatacagataaaatgagatgaaatattaaaatggaagttgaaataggtttaaatcagctaaagatgttactgggattaaaactcaaagtctagtagtaattcctatcatcataatttaggtattgtgattttaaaaaatcagggatgattgaaaaagagattattcattaatttcactgaactccaaaatttgtttaaattttttgttcatttaagcattttttctttaacagggcatgtagtacttgggagtgaagttgtcattaacgtgaccactgaatccattagacaacattccacaaaaactaattttgaataggacacaaattgtagacatttatacactgtatttgcctctttctgtaggttttgcttgaaattttaaattttagagttggaacgagcctcaggatagcatatgatacagtttttgtctcttgggaagggagaaggaattttattcatcaccaatgagagatgtgcagacatgaaaaacaccatcctagtatctctgaaatttatcttaagcatcacgtctgctattgcacggaggctgctagacattttctgactcattactcaaatgactcatgctccatttagtgtggtgggaatacatggagaagtggccagatccaactgagtaagtaagcaactggccagagttccctgcattttgttacctgggctgttaatttgctagaaacctcgagacattaacgttcctctgaagtatctgctgacatagaaagcctctttctccactcaggagaatatgccaacattttcccttctcaaattgaaacaggagatttccaattgtaacatctcaaatttatctcaaactgtagtaatagtttagctaatgtaagacagactgtaatttataagcatgtatatatttatatgtgtgtgtatatataggtatatatgtgtatatgtatagacatgtgtttatatattcacatagtgttattttaaccatactcatgttaagcattatagtttgtcaacatacatattaacttgccagggcactaactaagtcaacatacactttatttttatgatcaagaaatgttcacatacagtcatgcaccacataatgacattttgatcagtggtagagtacacatacaactgaggtttcataagattataatatatttttactgtaccttttctatatttagatacacaaatatacttgtgttacagttatctacagtattcagtatgttaacatgcagtaaagaattgttgcctaaaagcaataggttacagcatatagcatatagcgtatagcctatgtgtatagtgggctatacctatctaggtttgtgtaagtgcactcttatgatgtttgtgctatgacaaaattgcctaatgatgcatttctcagaacttctcattgttaagcaatgcatgactgtacaggtatgcttgctcctctactacttacaagtgatgggtgaaaggacaatttgcaggtgcatggaaaccagaaccaaggagctataacagcatttcttgagataacattgaagatcagattgtaaaattccctttttcttgtgagtgtttactttctttgcctgtaattaatgtccaaagacatggtatataaaagaagacatctagaaaatgtttcctaggaattagctatctgtaatagtaaaagaataaaattgggaaatgtacctatataaatataggcacatatacactaatttttgtggctttctttagctgtggtggtgaatactcccttcaaaaatgtttcatttattttagaatattaacattaggatcagcaatacccattttctccttagagatggctattttgttttatgtgaacgtttgaacttgttttcttttaaattattctttaaatgtcctcctcatgacaaaaccttgtgccacatatgatataagctgaattggttaatttctagcaaatgaaaatatgcaggtactttataagaataagatcttgtttcccatgataaactataggttgaataaccaaaggcagatgatgtgaatatttatcgtgtgtgtgtgtgtgtgtgtgtgtgtgtgtgttttgtagatggagtcatgctctttcgcccaggccagagtgcagtggtgagatctcggctcactgcaacctctgcctcccaggttcaagtgattctcctgcctcagcctcctgagtagctgggactacaagtgcacaccaccatactcagctaatttttgtatttttagtagagacagggattcaccatgttggccaggatggtctcaatatcttgaccttgtgatccacccacctcggcctcccaaagtgctgggattacaggtgtgagccaccacactgggcactaaagtgtgcacttttaaaagattgtagttctccatccctttctgtatttaaatgtctgttccttgtgctgtggtttagaaacagatttcggaagacaagttgatgatttttaatcatgttatccctttggtacatgatgctgggctggagctacacaaagtgagtgaaacacacttagtcttagggctttaggaacttaaagtgatcccttagccttttgaagagcgtgctatgaaatttgagtcacctggaattgtctaagcaacttaattattgttagctaatattagaaaaggggaagcagaagattgaagtttgtttttgtaacagccaatgaggcatctaatgattcaaatgtcgctcttaaagctaacttccttaagacagagcatctcattttcataaatgtcctgaggcagccgaacggttgtatatattcatttaatagaaataaaaaagacttccaaccaaatttcagtaatcaggaaagcctcttagcactgatgtcttctcagtgtgcaaacaattttttaagaataccctgaggtgaactctgcaacctttttcttacaaaatatacacttttgggattatttgaaagtggactctgccatcaaattaaatgaaccattgactacgttttcgttaagaggtctattaccagcttccttatttagtgtacttttattaaaatactattgcactttacatctgaatcctcataattcagatatttaatggacagtcatagggtattaaattgtccctgttatttttgacccaaaagagagcatggggcacctaatgtaaggggctaaattaaggagagaggaatctggttagcttctagacatttggaaagcctatgttcttggtccctcaaattgctgctgaaaggcagcttcagaatttggtatgtgagagcttgttccctgaactagctcagtgttaatttgggagggccagaaccatgtagtaccaaacctcatgtttatgataggttaaaaccaaaaaggtacctgttgatcaatgaggggtgttatatttttaatcagtgtcctcctttttatttatttgaaaaacagcatacaatttttttccataattagatctctattttaaggtgatgatcgacaagttgaatattgaattatctatatcactggatgagacctgtgtgtgtgtgtgtgtgtgtgtgtgtgtgtgtgtatgcaaatggatgcaaatatgtaattagacccagaagctatgggaaatgagaagcatgtggattttcaaactttccaaagtgcctagtaaaatgtatattaataaagtgggctttagggggataggttttcatccaccaccctgtctgttacatggaaagcacttttcccattacttttctattttaaatctattcccctgccccggctgattgtacctttctgaaatgtgccaggcagagaatctcacatctccttttagcttggaaataataacatcttcacattttcacggtctgttctgaaataggaacttttcatttatgcttcactcccaattgaaataaattgattaacgtcatggaattgtgtttcaccacagacctttcgaaacaaaaagttgcttttctgatgtggtaagggaacggattgtcccagatttttttatgctccaaggactcggggcaaagaaactgttttatcattacgtgttattgaatcctaaagaattttcaggttgcatttctttccttttgcttgtgtttttccctggagcatttgcagacaccatacccttggtgtttattaaactcagagctctctctgggacccctcttctgtgcttcctgacgtttctctcatattttccacctccttatctttttgtcctaggaaatgtttggtgccttgccttccatttcttgtattttttaaaaaaattttaccaatcatattcttaatttccaatgacgctcttgcctcttaaactgattttttccttttttatacagccttgtgttgggtaatctttgttttgcctgaggttcaacttctacccgtctctgtcttgcgtctcctggacttcctccctggtgtttgctcaatgggaggcattagtgtaagtttacagggtgtgaagagaaggaggtgagtatactcattccctcctttatttgccagacgatagtaactgtgtccttctgcaactacatctcccaccagtcatcttggcctccgtgactgtggctgccagtggctttgagtaatgctgttttgcccttgtcctttcagcagttgtggtagtcatggcttcctcccgttgctagtctttggtgtcccggcatccctcattgttcctttgcactgctcatactttcattcacaactcttcatgtgaaccgtaaggcataaaattctattttctgatgaacaaacaacctgttcttaacttataggagcagtatgttcttgcatctctccaagaactggaacttatgtttgtaagttctcttctgacctgtgaattctgtctccgatgccagttgctctctataaactttattccttacattttatactgtggtcttcttaattctttcattcttttaaatgaaaatcttatttgattaaaataactattaagggtttcctctgctattgtgtaagcctgtttctacagtttccattgggtctcccttccatgagttccagtccactacagtccttctggacattccaaccaggtaaatattctttgtgtacccatctctaatgtttagacaaaagaaaaaaatggaattgtttgtttgatactaaaagtcttccagtatctggagctcagcttacatttctaattccttaatctcagcacactttggaactagacatcccttccgacatacctttctcagccctgtttttgcacctgtgtctatttgatacctactcatgtttcttactagcttgctatcaacctactcagccaagtccaacagtcgctttctttttcctttttattctgacccttattacttactgccttgcctcatgtctcactgtatgccttgtcttacctgccagaaggaaaactctttggagactgattttaaaaatgtttattcttcctttattctttactccacttttgcctatcatctctattcttgggcccataaagatgtgacaggcacaaacgatgttcccaacctcaagaagctcagagtcaactggagagacaagcatataaataaggggaacacagtgtgcaaagggctatgataaaacatggggggtggggggcaacaactaattctgtcaggaaggaggagggaagtctgggaaggctgggatcgtctgcactaaattttcttaccctggcaagcggaaggactgaaaggagatgagcagggagcactctataaatatgagtcgactgatggagctttgtttttaactcaggaatgaaggggtacagggacacactcaagccctttgtttcaaagtgttacgttggaccatgatgtagtcaatgtaaagatgtgtttacacaactttacaatcctgaagttgcagccattcccagcctgggattcttgagggattaggagggggctatagaatgcgtgagtgctccacaatatatccctttcagttggggctgaaggctcgtctaagctcgtagtgcctgcctcaactgtgccccatcaccaggtaccacactgatttaagctgatacagcaacagttggcattactctgagctatgctcacaatcatcaggaagagctaaggttaaaaaaaaaaaaaaggagttggagaaggagatacaaggatgctggggacaatttgtgagctaaattgcaggcttaagtggtttccactggagttgcttttcttgttcttcaagaaaaggcagaaagtgagaaagaagtcaggataaaaggagagggctcacagtgtcttgaaaagcttccaaactcctggctctttgtagctcccatagctgctgggatcatagtttaaatcggaaagtagaacacaatagtcagaagtacataatactaaccagacgtggtggctcccgtctgtaatgccagcactttgggaggctgaggcgggtggatcgcttgaggtcaggagttcaagaccagcctggccaacatggtgaaatgctgtctctactaaaagtacaaaaattatccaggtgtggtggtgcttgcctgtaattccagctactcaggaggctgaggcaggataatcacttgaacctgggaggcagaggttatagtgagctgagatcacgtcactgcgccccagcctgggtgacagagcaagactccatctcgaaaaataaaaaaaaaaagtacacaagacataaatgaacgcagaatgaatgatcaccaatagcagactctttcgttttctctgtagaggaagaaatgtcagaatccaaatgatgacagtcatttgactcatcactctcacccagccttgaacggaggcagctgcgcttctctcccctttcctgagagcagcagggagctgcatgccttttttgtcttctcctgcttcttagagctgctctggatgctgcaggttcgttctcagttcaggaaggacatgtacggtttgttactgaggggacagaagtccacattgcaggctgttgggaagggatgaaagtcctctagaaagattttcacagcacttgagactctcctttctatacccactacagtttttagtttggagatccaagaggagaaagaatacaggaggaggggacatttgtgaggaaagcatctactttttagcagaaattcaaattctaaaggagatgggtgcttctgcagaagaaaggatgtgtcagagggaaatggtctcaaatgtccctaggacaccctcagaggggacgtttgatcagggaaagtgcaatatcacacagttatggacagtgccccatgttgtcctcatgattgcattccatccaggccttgccacttctgagctctttgtgaatggttaaccttcctgaccccaggctttctagcaaaaagccaagcagttctggtgaagagtctaaactttggccttgggaagacctgggtgcaggtcctgagcctgccacttagtagctttgtaacttgggatattttgtaacttgggcctcagttttatcaagtgaaatatggaaataataggaactaccttgtagggacatcaagaggatgaaacgaaatgctgtatgttgagcatttagcagcatgttgcctcagtacagggaggttgttggtgattaaagaactctgcgagttgctgaccaactggtcccaggtctgctcccattacctctttcctttttccatctccccagccaacattaacccctgtgctaggctgtcaaaagaaatgatgtgatgaatctgaccctgtctcccatctaaagccttctatcctttccatcaatggaccatatatttttttgttttatattttaagactcaagatggcagaagttgtgtagggagtaggaaaagaaaccacagggtgtggtttgcactgagaatactgatggaattcacattggataccaggatgatctgtagatagagtgtgtgtgtgtctgtgtgtgtatgcatgtatgtgcatttgtgtgatctttctgaaaatattggctgtggatttttagccattatgttatcaacagtctctttttttcctatcttatttgtaaacatgcctaggggctaggatgtgatggacatattctataaacacaataaatattataaaacagagtgaatctaacctacacatgctcagcttggagtaattaaaaagaaagaattatatatatgaacattcaaatatttagaaggaattataaatatatgtgtgtatgagtgtgtgtgtgtctgtgtgtgtatatgcatgcacagagaagaatatcagtttcaaagcagtctgtactgccttgatattggagatattgcatcaactttctgcccaaatactaattgttaatttggttgattaggtcttgatgggtaatcttgtggtgctggtttcaagtgaccataatttagaatctattgactctaagtttcttcaagtaatgcctgttaaatcttcccccccaaaaaaaagaaagaaagaaaaccttgggaaacactaccttgatccaagccgtcattttataaataaaaagcaatgaccaaagaaatgattttcctgagtttattgaatggtgaatctcatattctattcctgtgccataaataaaacataattatcttgtacttgaaggaagatgctatggaaagagaattcttcctctgatggacttcacctaatagcttttgttaccttgcttttggatctgttctgcattttgtttttcaaagaacactctttccagagagggtgcttaatagtattgcttattgtgtaaccatgtagctctattgtaatgataattgtatttcttttgaatccaaaagtttctctattccctctaaagcctgcctttatttgcaccctcctgactctacacttagagaaatgcccgacttttgttcttcatcttgaacataccccaggtgacctgtctggggacacactttttgctcccagagcgtatgcaaattcctgtttactgtaaaattttctcaaattctcctcagaagcctaaagacttctgtataatctactcctgtaaaagaaaattaattgatcttaattaatctttttcccctggatggcaattttttttcttgatctcagtgttggtaatacgtcattcattgttcttttttttttttttttttttttttttttgcgatggagtcttgccctgttgcccaggctggagtgcagtgatgcaatctcagctcactgccacctctgcttaccaggttcaagtgattctcctgcctcagtctcccgagtagctgggattacaggcgcacaccaccaagcctggctaatttttgtatttttagtagagacggggagatgggatgtcaccgtgttggccaggctggtctcgaacacctgacctcatgtgatctacctgcctcggcctcccaaagtgctgggattacaggtgagagccactgtgcccagcctccattcagtgttcctaataacagcttgtggctgtgccatttatttagtggagttattaagtaccccaagctttgctcttacagtgtcccttatagagtaaaattgcaggtcttgcttgccagtcttctgagagctacagtggcccctaagtgttctgggaactttggaactagtgcactatttttttttcatttttgtgttgacagtagtggatgtgaatttgctttggttcagtccaacaaatatttgtcaacactgtgccataacatgcgctaggctcttgagatagttttttttttttttttttaattttttaatgtactaagtattgtttctgccttcaaagaactcttgccctggtgaaggtgaccaacttctgaagtatatgactctgggtgataattgctgtattatgccaaacgcagagctttaagaagcatcaaactgtgacttcagtgggaaaagatttcacaaaggggtggcacttcagtggcatcctgtaaggctaaccaggagctttttagaaggccaagaagcttggtaatgtcttgaaatgtgttagataagttacaggttcttatctcctcctgatccctttcctacctcaacactcttattcccaacttatacatactctcagaggatgctgtgcctggagatgtattaccaacgagtaaaaaaattgctattttagtcccgattataaaagttgcagtgtaattctttaaatagtctttcccattaaattcgtcctcagtatgattattctcaccaccacttctgtgcttatgttatcataggacagtctctctgctgaacatctcctctttctttatttctgtgtttattttccctgaaactctgacagtgattccagtgcagcatggcttcccaaacatatctgtgcaatggaattacctggggagcttcgcaaactactgatgtctgtgtcccaccgccatagactgtgatataattgatttgtggcatagtctgggctttggaatttttaaagatccctaggcagtgatgaaaacattctagaattgattgtagtaatgattgtaccactgggtaaatagattaaaaaccattgaattgtatcatttgggtgaattacatcaatgggtgaattgcatgatatgtgaattacatctcaataaagcagctatatatgaggcaggagaatcacttgaacctgggaggcgaaggttgcagtgagccgagattgtgccgttgcactccagcctgggtgacaatagcaaaactctgtctaaaaaaaaaaaaaaaaaatatatatatatatatatatatatatatatatatatatatagtattaataaataaatatctctaaatatgaggtgactaatttgggaagtactgccattgagtataaatggggaaactgagatgtaggggagggacttgcccaaagtctcctagctagccagatggaataagaacccaggcgttctgacactagagcttacgttctcctctactatatcgtcctggtgtcttcaaacatgaaggtgatcctgctaactcattactcagtaggcatatgcttggagtagtagtgatggatttccttacatctattcacatgtcatactatgtaagcagtggatctaatttgcaaaataattggctttagaataagataaaggagttagcctctttgggaataaaatctcagttctcaatcactttatcacagtactgaaataaaccacgccagtctcctttggtggccaggaggtatccttagaagtacatttaaagaggaaaatgctggtatcaaagttataaattcaaaaccaactgttctacatcctggaatctgaaaatagatttctattttaaagatactgcctgaaatgttaccttggtctatgtcaaacctttactgaatttgggtataaaacatacataaaaacacttaaactgtaataggaaaatgtttgggtttcagccacagacaggcaataaggcaagcccagagttggaaggcctgttttcatcagccttagaagacataaaatggaaaatatttttgaaaggaaaaaaaaaaaaaagaatctctagcataatgaattgtcataaatgtgttttcttgaaaaaatattcaaagtttaagtccccaaaatggtatggtgacttttccaagaggaatgctttgtctcttataagtaaagatgatcactgctgacctcttcataccttctacctctttaagtatgtgctcctgttaaaaataaagatcgagttcaaaaagatgagcttgactaagagctgaaagggaattcattaaaaatggccttttaaaatgcctaaaggttgagttccagtggtaggtttagttcattttgctttagtagttaggtggcaactgtttctcaaagtgttgggaagtctagcagttttcttttctttttttttaatttttattatactttaagtttcagggtacatgtgcagaatgtacaggttagttacatatgtatacatgtgccatgttggtgtgctgcacccatcaactcgtgatttaacattaggtatatctcctaatgctatccctcccccctccctccaccccacaacaggccctggtgtgtgatgttccccttcctgtgtccatgtgttctcattgttcaattcccacctatgagtgagaacacgcggtatttggttttttgtccttgtgatagtttgctgagaatgatggtttccagcttcatccatgtccctataaaggatatgaactcatcattttttatggctgcatagtattccatggtgtatgtgtgccacattttgttaatccagtctatcattgttggacatgtgggtcagttccaagtctttgctattgtgagtagtgccgcaataaacatgtgtgtgcatgtgtctttatagcagcatgatttataatcctttgggtatatactcagtaatgggattgctgggccaaatggcatttctagttcaagatccctgaggaattgccacactgacttccacaatggttgaactagtttacagtcccaccaacactgtaaagtgttcctatttctccacatcctctccagcacctgttgtttcctgactttttaatgattgccattctaactggtgagagatggtatctcattgcggatttgttttgcatttctctgatggccagtgatgatgagcgtttttttcacgtgtcttttggctgcataaatgtcttcttttgagaagtgtctgttcatatccttcacccactttttgctgggactgtttgtttttttcttgtagatttgtttgagttcattgtagattctggatattagccctttgtcagatgggtagactgcaaaaattttctcccattctgtaggtggcctgttcactctgatggtagtttcttttgctgtgcagaagctctttagtttaattagatcccatttgtcaattttggcttttgttgccattgcttttagtgttttggacatgaagtccttgcccatacttatgtcctgaatggtattgcctaggttttcttctagggtttttatggttttaggtctaacatttaagtctttaatccatcttgaattaatttttgtataaggtgtaaggaagggatccagtttcagctttctatatatggctaaccagttttcccagcaccatttattaaatagagaatcctttccccgtttcttttgtcaggtttgtcaaagatcagatggttgtagatatgtggcattatttctgagggctctgttctgttccattgatctatatctctgttttggtaccagtaccatgctgttttggttactgtagccttgtagtatagttcgaagtcaggtagcgtgatgcctccagctttgttcttttggcttaggattgacttggcagtgtgggctcttttttggttccataagaactttaaagtagttttttccaattctgtgaagaaagtaattggtagcttgatggggatggcattgaatctataaattaccttgggcagtatggccattttcacgatattgattcttcctacccatgagcatggaatgttcttccatttgtttgtatcctcttttatttctttgagcagtggtttgtagttctccttgaagaggtccttcacatcccttgtaagttggattcctaggtattttattctctttgaagcaattgtgaatgggagttcactcatgatttggctctctgtttgtctgttgttggtgtataagaatgcttgtgatttttgcacattgattttgtatcttgagactttgctgaagttgcctatcagcttaaggagattttgggctgagacaatggggttttctagatatacaatcatgtcatctgcaaacagggacaatttgacttcctcttttcttaactgaatgccctttatttccttctcctgcctgattgccctggccagaacttccaacactatgttgaataggagtggtgagagagggcatccctgtcttgtgccagttttcaaagggaatgcttccagtttttgcccattcagtataatattggctgttggttggtcatagatagctcttattattttgagatacgtctcatcaatacctcatttattgagagtttttagcatgaagcgttgttgaattttgtcaaaggccttttctgcatctattgagataatcatgtggtttttgtcgttggttctgtttatatgctggattacgtttattgatttgcgtatgttgaaccagccttgcatcccagggatgaaacccacttgatcatctacagaactctcaaccccaaatcaacagaatatacattcttctcagcaccgcaccgcactgattccaaaattgaccacttagttggaagtaaagcactcctcagcaaatgtaaaagaacagaaattaaaacaaactctcagaccacagggcaatcaaactagaattcaggattaagaaactcactcaaaaccactcaactacatggaaactgaacaacgtgctcctgaatgactactgggtacataaaaaaatgaaggcagaaataaagatgttctttgaaaccaatgagaacaaagacacaacataccagaatctctgggacacattcaaagcagtgtgtagagggaaatttatagcactaaatgcccataagagaaagcaggaaagatctaaaattgacaccctaacatcacaattaaaagaactagagaagcaagagcaaacacattcaaaagctagcagaaggcaagaaataactaagatcagagcggaactgaaggaaatagagacacaaaaaacccttcaaaaaatcagtgaatccaggagctggttttttgaaaagtctagcagttttcaatctgtctcttattgccaatcacaaacttttacgagagcaagttatcttggatattcagatttttaaaagtggtcttttatctatttgcttgaaatatttttctgagtattcattttgttgtgtaactaatttcccttttttgtaaatgaaatccattgctctcatatttttaaaggaataacaggcatctattagaatccaacggtgaagaatagaagtgggaactaggtgttatagcattctccattaacggaaagtgttgtattgtttatgaattcttgtattttgtatttgggatcagcccagcaaggggtcagccatagtgcttgggggcagcatgggtagtatgcccacctccatgcctcgtaggggtacagccatacctcaaagatattatgggttcagatacacaccactgtgaaaaagtgactatcgcaataaatcagtcatgtgaattttagtttcccaatgcatatacaagctatatttacacttagctgtagtctattaagtatgcaatatcattattcctaaaaagtgtacataccttaattaaaaatactttattgctaaaaaatgtgaacaataaaaatgggaaggtcttgcctcaatgttgatggctgctgactgatcatggtggtggttgctgaaagttgggtggttgtggcgatttcttacaataaaaatgaagtttgccatactgattgattcttcctttaatgaaaggtttctctgtagaatgtaatgctatttaatagcattttactcatagtagaacttattttaaaattagagttaatcgtctttgacagtgctgttgttttatcaaccaagttggtataatggtccaaattctttgttgtcatttcaacaatgttcacatcatcttcactaggagttgatttcatctcaagaaatcactttctttgctcacccataaaaagcaatttctcatctgttcaagtttgatcatgagattacagcaatacagtcacgtcttcaggctttacttctaattctagttttcctgcttttttcaccactgatgtcttgaacccctcaaagtcatccatgagggctggaatcaacttcttctaaactatgttcatgttgacctcccatgcattatgaatgttcttaatggcttctagaatggtgaatcctttccaggttttcaatttactttgcccagatccatcagaggagtcactgtccatgacagttatagccttacaaaatgtatttaattaataagacttgaaagtcagaattcctccttgatctgtgggctgcagaatagatattgtattagcaagtgtgaaaacaacattcatctccttgtacatctctatcagagcccttgggtgaccaggtacatcatcagtaagcagtaatatttggaaaagaatgttttttcctgagcagtaggtctcaagagggggcttaaaaaattcagtaaatcatgcaacagacagatgtgctgtcatcccggctttgttgttccatttacagagcacaggcagagttgatgtagtatcattcttaagggatccaggattttcagaatgctcaaggaccactgacttcaacttaaagtcaccatctgcagtagcccctaacaagagattcagtttgttcattgaagctttgaagccaggcactaacttctcctctctagctaggacagtccttgatggcatcgccttccaatagaaggctgttttgtcactatcgaaaatctattgtttaatatggtcaacttcattgattatctttgccagctcttctggaaaacttgctgcagcttctgtattagcacttgctgcttcaccttgacattttatattatggaaatggcttctttccttgaacctcatgaccaatctctgctagcttcagacttgttttctgtagcttcctcacctctctcagacttcatagaattggagagagttaggaccttgctctggattaggctttggcttaagggaatgttgtggcttgtttgatcttctatccagaccactcaaactctccctatcagcaataagtgttttactttcttactgtttgtgtgttcactggagtagcacttttaatttccttcaataacttgtcctttgcattcacagcttggctgtttggcccaagaggcctagcttttggcctgtctttggcttctggcatgccttctttactaagctttatcgtttctactttttgatttaaagtgagagatgtgtgacacttcctttcacttgaacacttaaaaggcgattgtagggttattagttggtctaaaaatgcaatatctgagaagcacagtaaagcaaaatgcagtgaaatgaagtatgcctgcactgactggttctttgaccatcctctttcctaactgctgccccacatttctattcatcagtaagtattattagctcttctcccaagacatatccagaataagtgcactgctgcctcaccaactcaagtccctaccgcttcccatcgggctcgcctttgtagcttcttaactgtgtggtttctccatgcttgcttggctattgtccactctctctgcagcacccagagtcactgctccaaagtttcaagtagaacatattacttctcccttgcctaaaaacttccaaaggctagccattttatagggataaaatttaaatggcttgcgtttatttctgttgatttcactcataattcagcctggcccatatcagggctttgtacttgttcttccctttatttagaggatcttgaggacctccaataaatagcagccctcgtctatgcctgggtcctcaaatttctcaaatgaattccaaaataaacaaaggaatgactgatagaggccaggcttggtggacatgactttaggtcttactcaaggtggctagctccagggcttctcaaagtcttaatacacatatgaattacctaggggtcaggtcaagtgcagattttgatcaattacatctggagtggagctgagaatttgcattcctaacaagctcttgggtgatgctgatgctggtattccccagaccacacattgaatattaaggtgctggctggtattataccctccaagtaggccaactaacttattttcctaataatagtcagtgtcagactcctcttaaaacctaggagtggggaaaagctggccaccctgacaaacacccttcctggattgctggcttcatttaccagtctcaagtgagacttttcttcttggagacgccacctggccaatttatctcaaacaacagtcctgctgccactccatcactcactctcaatggcattatcccaatgtatgtttttccagctctcctaactatctgaaaatgttactaactcatttagtcttttccccctggatcagagaatagagactgtctgttttgttcactgctgtctttccgtaaccataaaagggcagtgtttaatgtatgtagttgttaaataaagtaatatagattaattataagacagataaataatgagctccatgataagacattttctttttctcattaaccgttgtatccctagcatctaacacagggtctggcacatagtagatgttgaataaatgaatgagaactcaaacatagggaaagcatgttttcgggtaataactagtggatcaagttaactggaaagcataactttacctaggaagagtcagaattatctttctctctctctctctctctttctctctttctctttttctttctctctttctctctcttttctttttttttcttttctttcattttccagattcccatagtctgggcaataaaaaagagagaatgttttgatattaagaatggtgcctgactagttactaaaaggccttttaaaaaagaggctgccaaagcctgtaccatttggtaggaagctgttgtctactgacacatctaagcatagtcacagacattcctgagaatgagccgtcagtccttctatctctggctcccatttctatttgaatggtgtcagaactacaaagctcagtcactgagttgccttttcaagtcatcctggataatggcctgaactttttcttcatttctgtgagaagaattgggctattcacctgtcccctgcccagatgactattgcagattggttcattttgacatccttgattgaggtgttttttttttctccccatcatctgaggctgggaaaaaaatggctcaaacattctttgactagctcttattctatcaatagcgacttgtaaggactccacttctataacttggttgtaactggcttaatgagagaagaaatgacctgaaatttgttgagtgtgtcttggggtccaggtgctttggaagaatagctgtctaagagcttgaccttgagtattgactttgttctttgtttccaaaatgggtttggcccacatttcagtcctaccttagcgtctatctgattggtaatttgatgtgtaatttctacacatatgtcagtactttaggacattctgctgttttggtttggtttggtgtacaacagtaggctcttctaagatacattaaaaaaatcttaaatactagagatagagacatggaaaagtgcaatgaatgaatccatttattcattcagctgatgtttgttgggtatcaattatttgcctggcactttgctcactgctgtgtatatggggatggtaaatgaaaatattatcttattcttttcacaggaagggacttttctctttagtccctggctctgtgtcccttcctactcccttcctccccacctctccttgacacacacacacacactctctctctctctgtgtgtgtgtgtgtgtgtgtgtgtgtgtgtgtgtgtgtgtgtctccttacatcagtagaaatggcaactgccttgcctggtgacaacatgccagtggaggaaaactcacctaaaagtaaaggaccggctctattctgtcctctttctgtggtacctgcttgtggttgtgaacagtctgcccatcagtctccatatggcaagcaggccagataaggcctgcctggttcttcccatttccattttcaacctcaaacagaaagaggagatcaggatagtatgtcactgcagacctggggtgagggaacaggaagatccattttggttttggcctgaaccaagccgtttaaaatttacttacagaatttccaggcactactgggaactgcctagtagccattcatgaagctgttcttgcctaccacctggctgcttaggtctgcttgggagggggctgataggcaatcccaatctctgaccgtattcccagcccttaaggagatcattatctaatatgtaagacagagaggcaaatgcataattactgtgcctatgagaagccctgtactaggagtgtgtcccaggcactgtaaataatacaagacaggcacttctatatggtatactaattagttaacaccacattcttctgcagcagattgtatcactgatagccatgataagggaagaaaattgcccccaaatggaacctacaattgtctgtgtactgtcttgtttgtgtacttagaaactgtgcacagtttccccatcagagcataccatgttacagtttaattttggtattagctatgatctgaagctgttgggagctgtcattcttaaacatctgtacttgacttgtttaaacttagggctctggcctttccccaacagcctggcatgccaggaaaagtaaagaaaagacctcatgccattaaatagacaggtggtttccatggccaccaacacaggaagactccaacatcttagcaataagctgaagcagttaaaggggagtttgagaaacaatcagatttgtttaacagtgtgtgggatggcttcataagaaatggtgtaagtgcccgtaagagggacatgctttttctcatcttctagagctgggaggttaaacaggagcccagagatacatacgctttccatcttctcagtgggttagtgggaaaagtgaaatggatattagcaagcgcttggttagtaagagacctcttgtggggcagtttttgaggatcagaacattatactgtgcattgtcctctaaagtgagagagagcacaccagcaatttgagtggaaacatcaataaagaaataataaaaaccttattaaatgagaaagtgctggaaaagtgcatcaaggcaagaggggacatctcagcagcagtaacttgagaaaatatctttagggaatttagctgtaactgagagtgcgtgccacagcaaatgcatgcttcacttgttctctgtgacactgacacatcttttgtgatcttttctaaatgcaccctcaaaatgggttaatgttttcttgctttgtgctgaattttatagaaatgcatgcctctagggaaattttaattgtctccttatttattttgtcttatattaattccccatacagttgaaaattaatactgctgtggatttacacaatttgctaattagtaagaagcttgccatttactaacacaaatctatgaataaacccgctaatttaaaaattatatcacaatcagaatgttcccatggaagttggaagctcagagaaaaatgcggtctttagatatttattaacaaggtgatcagtcagaggattaccgtagaatatgttatttcaatgctagaagtttgttattcatgctcctaattgaaagagtcaagattctggaagatacacgtattatcacatccttagcttgaaatggatggaaccatctcagggctgccatgaaaagtttccctgggtcattagtctaaagccgaaaagtgaaatgagcaataggttttccatgttatgcagcaactctgattgattggtaatggtatctaaaagattctgttaatgccctgcaggagaacatgtcatagttaattagcgacatctgcctacagtgcaggaggaagatgccacaacatgagtgctaggcctgggcccttcctggtatagaagaccccaggcagtgagcttaccaagcaacttttacttttttgactggaggtcggagctcctgggaatgtgcatttagtggggaaaaatgttctttctggactgtgcaagaggagaagtaaataatgccatcctagaactccaaagaccatgctgagtcattagactcaggggtcaagtggacaggccaatggcatactcaaactctcctgagctccctatatgactctgcctcatctgcttggcttggttcacccatgacatcagagaaatatttaagttgggagcaaccctacttcaggcatgtgctgttactaagggtaattgatgcttgaaaccctggcctgagccatggaatggtttcatgtggccctgtgtgtatgccagtcagggacatgggtcagggagatgactagagattggttgacattatgcttccctgttagagaacaaaggtagggcagggtctagcacacacctctgtcttctgagccccgcttccatgagctgtttctaacaggctttgcgatacacaaaggcaaagacgacacaggtagcagtcaagtgatgccaacacaactctgtcccggcaggactcttggcgtaggggtcttctaaacaagatcacttgaaacggatcaaaattttccaagagaagcgttttttaaaaaattctatttgttgcctcttttggaaagcaatggtccttcctcatttttgcaatgaaaccagggtgcaaatgtatgggttactaatagctggcatttgaaatagtattttaaaagcaaaagcctttaagattacagagctcagagattctgcactgggagaacacacatcattgttttacttggactcaaaatgcatttttcaacaatacctatgcatttcattagtgattgcttatcagtcttttaattattatgttgtgcttctcagcccacgtggcaatgagagttgccataaattacccttagtaactggcatatgcttgaagtagcattgctcccaactttgtttctctgatgtcatgggtgaaccaagcaagcagatgaggcagagccatgtagagagctaaggagagcctgggtacacccttggcctgtctgcttgaccccgagagacctggcatggccaccttatggactctgagtaatctctttatacctatggaaaaccaaacagacagactctgtgggtagcagtgattgtgcacttgaaaattaattcctttcttgacatcatgtctatttttttttttgttcttcctgtcacctcctccgctcacccaccaggatgtagacatttggaatgatcatttacatgaaaaaagtacagcacataatgcaatgtgggcagaagatctttcttagcactgttggaggtggggaggagaccagtgtcacatacctgggtacaaatctcggctccatcacttgcttccgtgtgtacttgggcaagggacttaaactcttagtgttttcttttgtaaaattagggtgataaaaatacctcagaggctttggagaggagtaagtgagatatttacataaagcatttatagcataatgtctggtatatagcaagggctacaggaatattagctcttattagtatggttaacaaatgccaattttaaatgttactgcacaagttttctaacggaatggtctctccttcatgggtatcatcaggagatgtccttggtggcatcatatgtaaacgttgacctccaagtcctgttttcagaaatgacttctcttagctgtataaaaatgtgaaaaaaagagagcatcctttgccctgagcacagtatttcctagacagtgttcaacacggtggtcaccttggatagaaggcagcagctacaggagacaaaggcagcgttacacacctaggtgatgccactgctcctcttctctaccaccagcctctattaccttcagggtgttgctattccaaaacccaccccaggccctcattttgcctaaccgttttctgagcggtgttgggtgaccacttgtactgagaagagctttggggttttcactaatgggtgaccttgatcaagttgcttgacttctgtgggttttgttttcctccaggtctactgtacaggctattggggtttaaatgagcaaatgcaggtcaagtgcctaatgtaggctgggcatttagaagtattcaaccaatgctcatttgtcctcattggtgcaaggctcttgttgctgtgaaaggatatgaagacaaggaagagatggattttggatcagttgcatcttccctcgttaactatataaagacatgtttgtcatagtttcagagggaccagctccttcttaatcctttacctttctgtctcctctgcatctgggtctgtctttggtgctcagaaaactttatagatgtcacttaacatttgtctagcctcttttgtgttgaggcagtatgctgactactgcgggagtgtcaaggaaggtctgtatatagacggatcacccagatggctgtgagagactcactgttcattccaggtcaggaggagatcaaaagtagctataagaaaatgaccaattagtgttccctttgagaactcttagctccaggaagtccttatacaagtgaaaaggaggacaaggcagaaataaacattaagtgttattataaggaaggcaatagccagtatgtaaatgagcatgaccacacaggaaagctgttttgagtcagtgtgaatcataagaccaaagtgaatggataatagccaccctgcaaactccagctctcctgcagaaagcttgcctgcagacagaaatgtcccacctggcctgaacaatggaaccacgtgatggaattcaggtgccggtctcagtctgctagcttgttagtgttggatgatgctccccagtaggcagccagagcctcattactgttggtaacagtaagctaataattaagagttctgaaattccaaatggtgacaaatagagtgaagaggtaatgagatgggtaggattagagatcccctgatgagtgcctctcatggcgagaggatgaagaaatgaaaaaacgatgaagagaaaactgccattgtcattctaagagctgctgagaaataccaatttgtctagggtgcagggaaatgggaaagcatttgtcaagcaatgaaaaagcaaaattaccttgaatggagccctggataatgctgttctgtaaaacccatgatggtggaagaagagtcaagacttgattcatttaaattcgtcttttatttaatgttgtataataggcatctctgctgaagttgggaagctctatttcaagactccatgagcaagaacctctcagctacagtaaagtctggccatactggctttagtggggacataacacagaggctatagtttgactttttatgatttcctttaaccgacatcttctgagggcctggaagaacacagggaatcagtagtttgggacggctttggattcaaggccttgaatttatatctggttatcttcaaatgtgttttccatatgctaataaacaggattgaaggaagatgtgcattatatacttctaaacttgttctcttacaaggttgtaccacctgtagtacactgttacgtaaaaaatgtatcagtcatgtagttatcttgtgaataacaccgttagatattagaagaatatggtagaccacttaaaataggagtaagtctatagagtacaaatgatacatagctataattgacactgtaattagccttatactccgttttagcaaaaacctatgagcagcattgctttgccatgaatattgccaacaattcaggagtcaaaaaatggtggaataatttctctcatatgcagaatagtaattattatgttgtattcacttatgttgggaactttaatttgttcaatgtaaatgttcaaaatataatttatgtggtttttcctttggtatttcttttggtatttatttttaaaataatatgtgagaagtgttaaagtaaaagacccaatgtttcttaacctctgactggccttgctctgataaagggatgctacaggaacccctttggaagctcctgcttctgaaagatcacagttgattcagatttaccatacaagcttttgacattatttctgagttgatgtcccaatatgtccacaatgtcttcatacagtccatggagatgaatatctgtgatatctgtggattttttgatggtatagagactataatatagtagaaattttgattactccagaaagatacataacagtaaggtgattttcaacttctaattctcctctttaaggattgtttttgtatttaaacatgtaagttcgtctctgctattacagtccacatgaaaaacatgatttgggtttcgttttgtttgttctttttttttttttaaccgttaagatgaatctcagaatgaaaaaaacgaatctcggcctccatcagactgagaagtcatgccatactttgtccttcagtgtagaaatctgtttcctttttattcaggtttctgtctttccctgatacgttttttttctttttttgagatgaagtcttgctttgttacccaggctggagtgcagtggcgcagcacaatcttggctcactgcaacctctgcccactgggttcaagcgattctcctgcctcagcctcccaagtagctgggattacaggtgcccaccaccatgcccagctaattttctgtatttttagtagagacagggttttgcagtgttggccaggctggtctcaaactcctgacctcaagtgatctgccctcctaggcctcctaaagtgctgggattacaggtgtgagccactgtgcttggcttttccctgatattttgtacaaacacaaagctctaggccttgatgctggtgttttagatattcatcacctgtgtttggtttggaagaatcattttataaagtgacaaaagtagttctaaatgttatacatttttgtaaatatgataccatgtttaatactcaaggtcaggttgaagcataaaacatagaagtatccatttacaccctatatctttcttgactagatgagaagaacttcaggagcctctctctctctctctctctctctcctctctctctctctctatatatatatatattttttaaatatatataatttttatatataaaataaatataaaatatatatatatatatattttaaagcagtgacctctttttgcataaaaggtctccgtcggatcaatcagtggaagaagggggttgctgattcacattacgtaaaaacacaagtcctcacttgagtcataggtaggtttcttagaaactacaactttaaccaaaacaatgtataatgaaaccaatttgaccataggctaactgattaaaaaaaaaattcctgtggcatatttctcctcacaaaaacatcaccaaacttctaaataaaaaccaaaatattgttaatattaaatacagaaataaagatgatgtctacatattataagaaagattaataaaagcaagataattatttacccattcattgcagttcagggtctcaggtggccagagcctgtcttggcagctcagggcccaagggaggagcccaccctggacagggcgccattccctctcaggactcactctacataccttctcactcagaccgggaccatgtagacatgcctcttaatctcacatgcacctttggaatgagggaggaaaccagagtgcctggagaaaacccatccagacatgcagataaccatgaagatttcacacagacactggccccactcagaaataaatgagactgttaaaagtataagactgtatcttccttaattatctttccttctctcactggatgagtcagctacaaagcagatgtcattgagagtgctgggggcaccaagtaacatgtctaaagagctctggagcagaagagggagtaggtatgaatacttatcaggaagagggagtaggtataaatacttaccaagttggcaatgaacaggctggagtaagggcttcttggccttcactatacgttaggaatagaatcaccataggaactttcaaaataaaaaccaaaaaaaagcctgatatctaggtctcagccagaccaattaatttaaaatatctgggagtggggtgttggtgaggaatgtggaggacttggaaccctctttcattggtggtggtaatgtaaaatggtacagccactaaggaaaacagcttggcagttccttaaaatgttaaatacagagttcccacatgatccagcagtttcactcttaggtgtacgttcaataattgaaaacataagtccacacaaaacttgcacctgaatattcacagcactattcacaaacgtccaaaaatgtagtaacaaatgtccatcaactgatgaatggagaaaaacatgtggtgtatacatacaatggggtattattcagcctttaaaaggaataaaggatgaatacatggtaaaatgtggatgaatcttgaacacatgctaagtgaaataagctacacataaaaggctatatatcgtatgactccatttctatagaatgtccagaaaaggcaaatccacagagacagaaagtagaataatagttgccaggggctgtgggctagaggaaaatgtgaaatgactgctaaaggaaatggtttctcttttgggggtaaaaatgttctgaattaggtagttatgataattgtacaattttgcacacatactgaaaaccatcaaactgtacactagaagggtgaattttatggtatatgaattgtatgtcacttttcaaaagtcttaacagaaaaataatctgggaatggggcatatgcttttttttaagctcctgaggtttatttttatagacaggatctcactatgtcacccaggctagagtgcaggggcatgatcacagctcactgcagcatcaacttcccaggctcaggcatttcgtgccatggtctctggagtagctgggactataggtgcatgccaccacacccagctaatttcttcctctcctctcctctctcctcccctcctcccccctcctcccccctcccgtctcccctcccctccccccctcccgtctcacctcttccccctccccctcccgtctcccctcccctctcccctaccctctctctgtttctctctttctttctttctttctttctcactatatttcccaggctggtcttgaagtcctgttcttaagggatccttctgctttggtctcccaaatgagaggtattagccaccacaccaggcgtcctgagatgatttttaatgtacaatagtaaaatctttttttgaaagtcaaatttagaccctgaacactctggagcttgaatctttgttatcacgagtttctcattaagtgaaacgccacacaagaccttgtatgatctgatccctgctcatctttcaaacccatctcctcacctctgccttgctgcctgctgttaggctccaccccacactcttctttccattcctctaagatcttgagatcattcttgccttggcaattgctgtttcctccatctggaacattttatccccatatagtcacatacagtggacttcttatcattcaactcgcagatcaaacgtgagattcccctttcctttgacacttaggcagccacttctgcctcctccaagtcccttcctgttcttgcattttgatcatttccttcaagtcacaatcagaatatttttccttgttgactggcttgtagtctctactgcttgcaatacgcaccctgtgcctagaatactacatgagagcagagggctggtctgtcatatttaccactagaatagtatttggaatatggcaagtatataatacatatttattaaatgaataggtgattagagtttgatgaggaaaggttattaagtatatgtaatccctgaacatctttttaggagacagggaagaaactggtgagaatgaggttaaatatgtaaaacaagtaggtttacaaaaaaaaaaaaatgacagaacagagaagaggtaactgatgaagtgagatcttgaaaaggcagttggcattttgaaatacctaggtgttttctgtttataaatagctgaggttttggattttctttgacttgttaacaattgaaaatttttttagtgacataagttgatgacttaatatacttcactaaaaaattctctttgtataaaaatgttacaggtattcttgtttgcttaaattctgggacacttcaagttgtcttctctttctctttgttcactttgttatcttcttctaggatcctcttctactgtctcctgtggaattttgacatacgcctgtagattagaatgttttataaatcatataaacttcaatatatgtctccaaccattcatttatgtgccttgttttccaagtcatcaataaagtatgtttcagagcggggccagatcagattgtgttgttcctcagttagatgacagggcattgttcctctcaaggttcatcttgggatccattagccagcagcttttaataagctcatttacattcttggttaacaattgagcccctagtgtttaagttaattgaaatagaaacctactctccagttggtagaagtgtctggagttaaggctttttctgacatcccccaaagacattcgtgccttctaggattggtctagatttttgccattcactgagtaatgccagggtataaaaatagcagattattttttacagtgaaccttaatattcctggccataatgaaataacaactttatttttctagttaaaaggaaacacagttttattcttttaacgaagagaacagtgtttctttttcattgtgtctgacttcctggttgcctaggagacattaattttcatggtagattgttttatctaggacatttagaagaagttatttccctttatgttgtattcctaagtcatgacaaatttttattagcaatttggagaattagagaatgcctggcattaacaaagttttggggaaatgggacttttttctatacaaccgttggatatcaactattggctacatttcttgagagctatttagtagttcatacccgtagccttaatagttcaatatactttgaacacagtgattctcaaatctaggaattaatgcatgagaagtaatcaaagagatgcataaatgttgatatgttggtgtatgaaggaccttcctcatagggttgtcaggattaagtaacatatcatataaattgcttagaaagatgaaagtaccgagtaagtacttagctgttatttctattatttaatcagatggtagtttttgacactgctctacctctaatatggagagatagtagtcacctaatggcagtatggtgtcaaatacatgattttatttgtatttatgtaaccattacataccatttttgtgataagcattatacgaagcaacttaacaatgttagcttatgtatgagttgacaattaacaattgtttattgaataaaattaggcattacttttgtcaaggcaaaatacaccaatattgtgactagcacttatcaaatatttaagtgctttatgtgtgtccttgagaagaaggtactgttgtcatactcatttctcaaatttaaagaagctaaggaacttgcctgagttcataaaatgaattggaaagaagatacaatcggaagccatgtttgtcaaatccccgtgatgggttagctacattgttgcagagattgttggagtcaagagtatgatgaagtataggaatttgttttttgagaaagttctcaagttgatcttaatagacctagttttaaaactagtgctctgagatgtgcttttcaaacgttaatgtacaaacagcctagctggggatcttgttaaaatacaggtttatgcattacatctaggctggggcctgggaatctacatttcttacaactctcaagtgatgctgttgttgctacttagaggaccacattttgagtagccaggcaagggaaatatgcgctctttttcttccaaaaacatcatttgctacagaaaagagagagaaatcatgaaatgggatggaaatgttttcaggtaatctgttgattagaatttcacatcttcatgagcttggtttcttaggtgcatttgctgaaggcctgagtttcttaaacttcggccagtgggttttgaaggccctcatgctctcaaaaagtttgtatttattgttctctatttgatgaaataatatgaaaatgacagatataggcttatattttaaatcagctgcttgttgtctgataacagagtactgctatgtggctttagtgcaaagggattgcctaaagtgacagagttgttattaattcagtatttcccaaatcagggccctgaagtcttatattcccaagtttaagaaatccttgaataatattctctatgaagagtgtctctctctctctctctctctcgctctctctctctcgtgctcctttttttctgcctgctttatatccactgccagctgattagattgtgcccaccagattaagggtggatcttccttccccagcccactgactcaaatgtgaatctcttttggcaataccaaaagagatttcgttactttagttggatgttaacataacatttgaaagcaaatccggaaaaagaatctgccctaccctgaagtgagctattgtcagttcctgttcacagcttggagatttcccagtttggggcctgcatttgcttttgtgtcactgaaccttactctactacaagttaggttgcctatctagccctgtcaaaaaaatgactgaacacatccactgagtcacacacaaaaggatagtagagatcttttcattgtttcttttatgtttattaaattttaaagataaagctctaaaagtgttatgctaccagctggcgagaattgtaggagatgcagatgtaaaggtagtttataggaggtagagagggtacaaatatgtcataagagagaggtagcaagaggctaccttttatggctgaaaagtgggaaatggagactcatttaagaatgttgaaatcatatatttttagtcccaaataaaagaagttttcaccaaaaaaataaagaagaaagtaatcggctagaaatgtgagaccttttttttcatttatgtatctacttctgtttgtttataaagagagagtagggttcaattaccatttctagagtaaaccaagttccttgtatttccttcttggctaatgctcactacaagtctaagggtctaaaccttggactgaggttcctaatccagtatttgcttctctggcttacagaaaccaccatctccatatttgctaagaagcagttccctgaagatgattttccctggaaaattccacagaatattggtacatctagtctttatatttggtagaaagattcagcaattttacttatctgaaaataaaattgctttctgccatttttatgtgaaaggaaagtatttaatatttatctcagtcttggagacagtttcagatcctggagatgcacaaattttcccatcaaactctattgactcttaatctttttaatgcttttgtcccttttagagttcctagaatatttttcttcttcattgaaattaaaacttgaagaaataggtgtactagcagcatatatggggaggatttttaccacaattaaaaaagaggtagacttagatttgggtagggaaagagagaaaactattagtatttaagggtacctacatcatgtggcagacaacgagacatgctttgtgtacttcattatctactattttcaaatgagatgtctgaggattagaaggttcagtgaattctggaagatcaggaagagagtggcagagctgagactctttatccactcaaaagtgtagcctagttttgaggaaaagggaggactaaaggccagaaagggaaagtaagattcaaaagaagcaggtggtgctggagcccacagctgcctgtgagaagggaatgtccttacatctttgtaaacaagacaaatgaaaatacaatcagtagagtaagtggggagagagggatggtgggtaaaaaagcatataaagcattatttgaaattataacaatatcaattcagcataaaagttaggacatgacgaagatgggatatgatatctggaagagatgaaaggaggtaggaatatactaaggataaagatcctgatctgcttttaaacactaagcattagtatggataggataagaacacgaataaccactactgaaataaaaatagaatgtgtaattttcatactcatggggagagaaaaaccagacttaacccgtggaaggtagacaggagaaaaagtgaagtgaaacaaacgaaaagataaaatatctgaaataagctcaaagaataattagtgtaaatgtgtagtgattaaacttatccagcagattctttaatggatagaaaacaagatgctatagtattttattaaaaaaaaattcaagagaacacacgctaatgtaaggtgatggaaaaatttatacttgtcaaatacaaagaagaaaaaggaataagaagaccaagggagtgaaatgaataggaacatatccacatgtagtaatgtagctttgaggtacagaaaacaataatttatggcgttagacattgatttagcaaatatagttagaaatttaaaacagtcctctcagaaaccaatgaagcaatgagacaaaaagagagatttggataacaatttgatgtctcatgtatatagaacttattcaacaaaagcagagcatactttatttcagagggcatgtggattagacacaagcttcaactttcaatgagtcaggaagcctcaaattctaaaaaatcaacagcttagaggttctcttaacaacagtgctataaaatcagacactgttaacaaaaagatagcaaaaacatcctatatatctggatatgaaaagacatactatgaaataaccctcaggttaaataggaaataataacaagaatagcaaagttttagagcggagtgataataaaagcacagtaggtgagagatagagctaatggaatactttcacggcaatatatagcttttgttacccaagagaaaaacactaagtctggaatcctataagcccaaggtttgactcaagtaactagaaaaactgcaacatagtaaatccaaagaaacaataaaggaaaacaaatcagaggaaataaatacaaatgtggtaataaagtaaaaataattcataaaagccaaagaaccagaagttcattatttaaaaaacttcataggatagatcttacttttgaataacagatgaagaaaaaacatctccatgtaccatgataaacacaatacgaaataggtaaaagagataattacagattatatttttaaatccagtaaaaagaatataagtttttaccagtattatgtgaaaaggatatatggctaagaaattgatacaagaaaaaaaaaaagtaaatcagaaaacaataaattgtaatgattgtcaaaacttagtcctttctggcacaggagaaaaagacacagtttgacaaaagagttttgtttaacgctcatgaaacagaaaatgctcgtttaataaactctctttggaacaaaaaagaaaaaccaaactattatgtttaatcttgataacaaaaactagataagttggctgagcacagtggctcatgcttgtaatcccagcactttgggaggctgaggcaggtggattacttgaggttaggagttcgagaccagcctggccaatgtggtaaaacactgtctctactaaaaatacaaaacttagctgagtgtggtggtgggtgcctgcaatcccagctacttgggaggctgaggcaggagaatcgcttgaaccggggaggcggagtttgcagtgagcccagatcgtgccactgtgtccagcctggaaaacagagtgagactctgtctcaaaaaaaaaaaaaaaaaaaataggttgagaaattattggccaacttcacttatgacattcaaaaggctaagaattcaaatctagcagtatattaaaaaataataccttgtgacggagttgaattaatcataatagggaaagaatagtgaattattatttttaaatttgctaatgtagtttgccacattaatggcacggaacaagcaattgtgtcatcagtgatataggaaaagcatttcataaaaccaattttttttaaaaaaaggtatcaacccttagaaaacttgaaatagaagggatatttttagcttgattaaaggcttcatattaaaaacctagagtagacatcattcataatacaaaaaaaaagaagtttaaactcagccctcttaaggtcaggaacaagaaaaggatccctgtgttacttctgcttctcaatacattaccacatacctgaccaatgcagtacgacaaagaaacatgaaagtaggaaaattgccatgaaagatatgattatcattatttctaagtgaaatcatatatataaaaacaaagagaagtccgggcgcggtggctcatgcctgtaatcccagcactttgagaagccaagatgggtggatcatgaggtcaggagatcaagactatcctggctaacacagtgaaaccctgtctctactaaaaatacaaaaaaaaaaaaaaaaaaaaaaaagccgggcgtggtgcgggcgcttgtagtcccagctactctggaggctgaggcaggagaatcccttgaacctgggaagcggagcttacagtgagccgagattgcgccgctgcactccagcctgggtgacagagcgaaactctgtctgaaaacaaaacaaaacaacaacaaaaaagagaatcagcagaaaccattagaagcaatgcaagagttcagctagattgccagctataagaacgtagaaaaatcaatagctttctgctgtattgggagtaactaattataaactatgacaataataagataccatttataatagtgacataaactaaaagctatctaggaataaatctaagatagaatgcataaaacgtataagggaaatttaaaactctattacaagagttttattatggtattaaagagcataaatgcagcattcataaatggcttcgttgaatattttgaagatgtcacattcccctcacccgtcttacaatttaaattcagtctaatcaacatctaagaatttttttttgaaaggggcagagtggaggctaaaatttatatgggataataaatacagaaagaggatctctgtttttctttagacattaacaagatacagcaggagctggcaaactccccctataaaccaaatctgggctgctgcctgttttttcaaataaagttttactggggcacagccacgcctactcatactgctttcatgctgccatgacaaagttgagtaattgcaacagacactgtgtggcctgctgtgtctggtcctttacagaaaaaaaaaatgtgcaaaaatgtgcgacctctgttctacagcgtctggctctgaagcagaatagaaaggagtctagacttattcctgtgtatatatgggaacttactgtaatcattcccaggaattggtactaggaaaattggctcacaaaaagaaaaatgaagccgtttctgtatttcatactataaacaaagttccaagtggaataaatacctaaatgttaaggatgaaaatataaagtcgatagaagaaaatataggaatatatatatttgcaaacttatggtagagagggatttgttcggagagatttgcagagcacaaactataaaaagaaaattgatggacttggaatacatcaaaatgaatgatttctgttcaatggagggaacgatagagaaattaatagatggtgaaaatataattattgtgtttaatagaccatgatcaatatttagaatatacaagggactctacaaaattagaaaattgaagggaggaaagcaatatgaaagaggacaaagtatatgaattggcaattcataagaagagaaacatgcatatacacacacatcacactattagagacaaatgaagtaaaaggaagagacgccattttaccattcaataattaaaaacttggaaagcaggaagtactatcaagtgctggtaaggatgtaggaaaatagaaatcctaatgtattgctgctgggcgtgcaagctggtgcatatattttagaaaatctaagtaagtatctgacctgaatcccaacaatgggatgctaagataggaatccagggaaacgtgtaagaatggtagtcacagtgtaacttgtggtaaaaggttgtaatcaagctagctctacagcactagaggaatgggcaaggaatactacagtggaatgcagtgaaggaattgtttatggcaacatggataaatttctaaaacaatgttgagagaatacagaagaatgggatttaaaacctacaatttatatacaaatttaaaaattatgtataagggccctgtgtatttttgacaaaaaatgtatgtacacaaacatgtaaagaggattctgaataatacattaattatgaaaaagtgaatttctgtggtgggaagggagggaatgggactgaacacagaggacaaaaaggaaaatgattggaaaagtgaaaagaaaaagaagagcctttcatgggctcatgataatagtagctcatcaagtagagcctgtgctaagtcaattctattccattatcctgaaagaaacttctggtacatgacttcttctggcaatgttagatccatgtgctcagacagtgtcatcaggtatgggtctctgtgtcttcactgtctttgcctcagtattggctctcacatcaagccagctcttttttaggaaaactcgtagctgtttcaggttcatagtctaccagtttggcaactcagttgaaagaaagtggcattgttactaatagcagtattactctgaaggatgtccttgcctttgattggctcattttgtgtcctgtgtccactcccgaaccaatcatatgtcaaaggactatgggtgcctgggtcacttgcccatccctagaaccaggtagtacgaatagccccacatgtagaatatggtggggtgttactaaaagcaaaaaatcaaagtggtacagctaagactctaaggaagtagattctggggagggaaataatcacaggtcacttgaatcaatgctgtttgtagaatggtggatgtgatttgccatctttattcttgaaaaacaagaaaaaatgaaaaatagctaactccaaatatctgaagcactgccacttgcatgatacttgttttatatgatcccaaggaataaagtcatgaaaaacagatggacttggtataaagagcaactatgttatttgtagagttgactgtcttaggaggaatgtgtgatgaacttcccatcactggacatattcaagcatatgctaggcagccatttggcaggaattctgtaggaaaaggcccaaggattgggaggatagttgggtttggtcagtggttctgaaacacctggacagctatggaagccttgattgctgggcccttgtcccagagtttctggttcagtaggtctggggtggggcctcaaaatttgcatttctaataagttcccaagtgatgctgatgctattgtggagggacgtcaccttgagaactgttgggtttttaatgagctggttgtaaatgttctaaaaaccattatcttgtaccactggggcaaaccttcctatcttatttctttagtacctgaaatgtgtacagttctggctatgtgggtgtgtccatagtaagtgacatttgcacagctctctgtcttctgtgtcattgagaatattagaatcattaaacaatcatgcattattcatgtgctatataaaataaggaaaaaaatacactcaacatgtttttcttctgctttcacaccagcaacaacaatcagcaaagactactactgtgaccaaatgtgtggggtttctttccccccaacacacaaagcagcggacaccagctggatgtcctttgattcatttcagaagaatttggatgttacgtacctggagatagcctcagattccacaggttgagggctcaatgccatgagactgtcacctgactttcagacaccagttgcaagtctgggcctctggaacttccaactgactataaatcagggaccccatggtcccttctttgagttcaatcaatttgcttgaacaactcaaagaattcagggaaatacttaagtttaccagtttatcacagcaaatattacaaaggatactgatgaaaagatgcataaggtgaggtatgggggaaagagcatggaacttccatgctctcccagggcgagccatccttcaggaacttctgcgtgttcagctatccagaagctccctaaacctgttcttctgggtttttacagaggcttcattatgtaaacatgaccgattaaactgttgaccattggtgatcaacttcaccttcagcccctctctcttcctgggagattgaggagtggggctgaatgttctggccctataatcctgctttggttcttcttttttattttaatttaatttattttattttatttatatatatatatttttattatactttaagttctagggtacatgtgcacaacatgcaggtttgttacatatgtatacatgtaccatgttggtgtgctgcacccattaacttgtcattcacgttaggtatatctcctaatgctatccctccaccctcgccccaccccacaacaggccccagtgtgtgatgttccccttcctgtgtccaagtgttctcattgttcaattcccacctataagtgagaacatgcagtgtttggttttttgtccttgtgatagtttgctgagaatgatggtttccagcttcatccatgtccctacaaaggacatgaactcatccttttttatggctgcatagtattccacgtatatgtgctacattttccttaatctagtctatcactgttggacatttgggttggttccaagtctttgctattgtgaatagtgccgcaataaacatatgtgtgcatgtgtctttatagcagcatgatttataatcctttgggtatatacccagtaatgggatggctgggtcaaatggtatttctagttctagatccctgaggaatcaccacactgtcttccacaatggttgaactagtttacagtcccagcaacagtgtaaaagtgttcctgtttctccacatcctctccagcacctgttgtttcctgactttttactgatcgccattctagctggtgtgagattgtatctcattgtggttttgatttgcattttctctgatggccattgatgatgagcattttttcatgtgtctgttggctgcataaatgtcttcttttgagaactgtctgttcatatctttcgcccacttgttgatggggttgtttgtttttttcttgtaaatttgtttgagttctttgtagattctggatattagccctttgtcagatgagtagattgcaaaaattttctcccattctgtaggttgcctgttcactctgatggtagattcttttgctgtgcagaagctctttagtttaattagatcccatttgtcaattttggcttttgttgccattgcttttggtgttttagacatgaagtccttgcccatgcctatgtcctgaatggtattgcctaggttttcttctagggtttttatggtttttggtctaacatttaagtctttaatccatcttgaattactttttgtataaggtgtaaggaagggatccaatttctgctttctacatagggctagccagttttcccagtaccatttgttaaataaggaatcctttccccatttcttgtttttgtcaggtttgtcaaagatcagatagttgtagatgtgtggcattatttctgagggctctgttctgttccattggtctatatctctgttttggtaccagtaccatgctgttttggttactgtagccttgtagtatagtttgaagtcaggtagcatgatgcctccagctttgttcttttggcttaggattgacttggcaatgcaggttcttttttggttccatatgaactttagagtagtttttttccaattctgtgaagaaagtaattggtatcttgatggggatggcattgaatctataaattaccttggacagtatggccattttctcaatactggttcttcctatccatgagcatagaatgttcttccatttgtttgtgtcctcttttatttcgttgagcagtggtttgtagttctccttgaagaggtccttcacatcccttataagttagattcctaggtattttattctctttgaagcaattgtgaatgggagttcactcatgagtttgctctctgttgtctgttattggtgtataagtgtgcttggtccttcttgtgatcaaccccatcctgaagctacctagactcttagaggctgctagacaccagtcaatcattagcatacaaaaagacatcactttggagtttctaaggattttaggagttgcgtgccaggaaatggggttgaaaaccaaatgcatatttcacagtatcacaaatagccaactattttctaatttcatcctttttgtaatcctttctctgtttttctgtagattgatccatgttcctcagtttcatactaggctgttcccgaattagaaaaatgaagtagttttctagggatggtgtttcttagtcattcacaaagtgtgtcttagtcattcacaaagtaactttgtcatgtattggcatccacctgattgaaaagtcattccttggtgctagatggatttggcttgtctcagctgtgccatttgccaaattcccttcagcctccctttcctgcccccggccccccatggctttccctcaaaaggaagacgcagaacatttcaggtaccttgctgctttgtggccctattacaaccaggaattgttctagttttgaactccgttttgctccttccttctttttaaatgttttttttctcctttattttggagattttactagaatagttctctggaagtgctcatgtttttgtaattgtaggcaaggtcagacagtgttcgtacttgttctaaattgctattatatgaacacaaaaccatttgagagaagcatttaagaattagaaggtttatagttaatacttaatgaaaattttcagcttagcagacatgacaaaatagatgggtaaaaataagtagctgacaaatagggccttgtggatttgagttaaggtggcaccgtgaagtgcagagggagtgaaggggaaaagctgttttattgtccacgtggaagcttctgcttgaaaattgctaactctaatcaaggaaacactggtagggagagtggagtattttagaaagactttcccagaatgcatcttggtgaacattcaatgaggaacaatttcaatggcatcctctctgcaactaagaatctgtagtaatggaatttgctttctttaaggtggtatatgaactgagtttcttaattgaattttataactatccattgtcttttcttttagacttcaactgtgaggacatgtcgttcagatttggccaacatctcatcaagccctctgtagtgtttctcaaaacagaactgtccttcgctcttgtgaataggaaacctgtggtaccaggacgtatcctttctttttttttttggagagggaaaataaaagtcttctgagcctaaccagccaaatgaatataaatacaagattggcctccagtctgtccaaaaaggtaaataaagaatccatctccctcccacttcggagacaccaggtaagatgttactcatatttattctgaatccagttggtggcaccagtaatatgcttgatcaatgttgcagaacttctgaggagagttgcttagcaaccgtggctttggaggtgaatttttgcttgaccttttcactaccatagctgagtaaataaataggtgcttctaaaatgagcccagtgaatatcacgggcacttggttttcagcttatctgttgtgaattttaatagtagattgagtggtgcctttgtgatgtggaagtaagatatgtgaggatttgagactgactttgttgctttacctcttggagatcattcaagttgtgcgttttaattaaatttatattatagatacacttacaaattttttttaaaaaatattaggacctgaaatagcattttctcttgggaaaaataccagcttgcagatcattgaccagtgtcattggtggagttgttttatttccctctgaccactgagttgtagtctttcctcctatagacttcaataggagctttattcttttgcagtgggaataacaagtattggtgaaatgcttgggaagttatctttatgttgttaaaagtttcactcctgattgtgtgcatatgaattttgtacggactcttcaggatgtttttctctttcctccttcacttagtttgccatgcagaaggcaacagaataaaatttgatattttcagataataagtattttccacgctgagacatgattttgctttgaaatgaatttcttagtaattctgaatgtacaaatatgccaagaggtttttcagagtaagctacattttttttccagtgaaaatgtggaaagtgcctgagaactttatgaacaagcttcttttctagccacgtaactattgtatgctaaaaaaaaaaaaaatacaaataagaaaaacatgtaccaaaagataattgtgattgtattatagactcccaaatttctggaatccaaattctagtcaaataaattgtattaatttagaaaactaataagcaatactctagtaaatatgtaagcttttcttaatatttaaaactcttcttttaaatgagtctaaataatattagaaaactattttcttctgtttattaaaaaaaaacactagaatgatttagaaaagccctagaaaacagcacttttaattttaataccaattgtgtattgaaatcttttaaaagacctgaatttcttgaagtaacattttattttgctataagtttgtagtgggctttttcctttggggttttttaaagcaaaatgtctgtaaattcaggtgttaaaagaatatggtttaaatgccatctctctctaggtgccagctttaactgacttttagaaaagaaataaagggacctgggatgaaaatatgaatttagacaagatccatttgtctaaattcactctcattcctatgaaaattagaggtcacagagatgtaccacttttttttgttgttgttccttttgaggcagagtctcactctgtagcccaggctaagttgcagtggcacaatcttggctcagtacaatctctgcctcccgggttcaaccgattcttatgccacagcctcccaagtagctgggaccacaggcaggcactaccacactgagctaatttttgtatttttagtagagatggggttttgccatgttggccactttttaaaatggttaataatggaatgaactctgctttgtagtttttttactcatatcttgagagtaatttgatatttcagactttttaacaaactcagaaaaagtgatgtctaaaaccagggcatacctgagtttgaactcaagaaaagtagaaatgtctatgtctaggaaaatatctgtagtgaatagtgagcaagtagtgaatgacaactcgtttctttgtagatggcactggtgtcaccatttgggaaatgaaccctgctcagttactttatatttgagtaaataccaagggctcggagaatattttattaaaattaacacacttcagtttgtttggaaggtagcaagaaggatccaaccctctctgattataagaacaatgagaaccagagcttttttaaaatcattatactctataagtctaattaacagctgcagtatttaaaacagtctcagggccagtagacagtgtattcagacaatgctttttatgtgatgattttgtaactttttattttactttacctttataaactctgccatgttacaactgggagacgcatcttttttttttttttttttttttttgagacggagtctcgctctgtcgcccaggccggactgcggactgcagtggcgcaatctcggctcactgcaagctccgcttcccgggttcacgccattctcctgcctcagcctcccgagtagctgggactacaggcgcccgccaccgcgcccggctaattttttttttttgtatttttagtagagacggggtttcaccttgttagccaggatggtctcgatctcctgacctcatgatccacccgcctcggcctcccaaagtgctgggattacaggcgtgagccaccgcgcccggcctgggagacgcatcttaataaggtactcctttgcttgcagaaagctctagtcttttgtcctgagacttgagaatggaagatgtggatagctctgtccactaacatttcataaataaatggtgagatgtctggagtgggcttttatcttcctccagtgttctctcctgcctgccctagtctagcccttaggtgtggttcatctagatttatgctgtctccctgcctctgggcttttccaatgtagcctataactttatctgaaccacagccctgaccatatcattcttctcttcccttgttaataaaccaataaggaatgtctgttttttgaggataaagtccaaattccttagaatagtttttaaggaccttcattgtactggctcagtctcccttctttccggctgttccctgaatatgtgttgtactatccctttactatactttctcctgcccctcacctcaactggagattcctccccatgcttttcatttcatctgaagtgctttgataactgtcccctgctcctagggaagaaaacaaaacaaaactctgtcctctgtttgtgacactcacttccttattctcatgttgattcattcagtactttattactgagctcatactctgttccaggtaccaagaccaaacacatagcccagtctgcctcatatccaaagtacgtgcatccctatttctgtctgcactgagtctttgcttcctatggacgagacctgctcttgcacatctcttttttcttagcatccaaatgtactgtgttcactgaatctaaagtgaagctggaaacatcaggagtatatgcattgttccagttaacagaatagagagacaggatgtgccgaaatcccaccttttcccgtttcccatccccaaggccaagtcttgtcgccacttttttccagatgtttcagtatcatgtccaagctaggttttcccagcttccccttcatcctttgtccattacaattctgtttacaagcgtgtgagtgtagggagttaaatctaaaagcagtgaatgaattgatggcagatgggagaaggttctttgccatttctttacatgttaatttgtgaatggaccaatctgtgttttaagggcagtatattggcatctttatgtaaaatggaacattttattttgtatgtttgatgacttcttaaaaatggcattcaggtgccctttggggagtgtgccattcatgagaggcttgtaaatgtcatctttgaacttgtctctcttataacattttgctgcccctcaccaacacttatttcttatgactttgctcactgactttttcatagctttcagagaaagaaaaagaactgtcaaatcagaggccaaagatacgcttttgaagcaggatcgtttgcttcattctcaaaacagccacttcagtccctccttgttcccacctgaagcaaacgcttctgttccttgccaacactgtttaaagcctattgaacaggctttggcttctgtggtgcaacgcttagaagaatatgtcagaatgtctttaatccattaatttcttgttactggaaaatgcttttcagagtttcttggtgacagaatcattttgaagagtacacattcagaattctgcagcaaacattttattcctgtgtctcagtgcagcccagctattgttcatggcttaaataaatttgaaccattatggctaatacttctccttacccccactccctttgctttgtgctgtgtctatctctcttcttgagttgagcatgaaaatgaatttaaacattagtggtatccatttgaagactggggctttcattgtaaataaaattattcatttgttctgtcgtcttcagcagagagtgtattgatctctgcattgctattctgaatggcataaggagctgcaacatgagggagacacagcaacatttgtggatgaattgaatagggtgtgtaatgacagaaaccttgctcactgatcatactgtattctacaaatcatacgtcaacagtttattgaatcagttattaaaaagagcagatttttccaatcaagaccatctcacgcagaatgttaccagggccatacaacattaggatgatgcatgtagggacagccttacaaagtatatttgtgagagaattagactaggtaactttaagaacatttctgctgacacattagaaataaaaagttggctaccatgcaaacagtgctccaagatccaaattcaaaaggtaaaaaagaaaactctgacaaatatcttttaatacggaatattaactttccaaagagcaatgttaagtttcccccgttttcagaccgttaccatgttgagtgttcctgaaataagtggaaaaataataaaaatagcttcattacttaacagtgattcttacagaatagatgctatacataaaagcgcccttttagtccttccataaaaatcagaaatatttgtcatttcctcagtaggttgtaatcttgtgaattcctttaattgttcaggaaactgcagttattagtgatctttcatttctctaaagagtttcttttcggccgggcgcggtggctcacgcctgtaatcccagcactttgggaggccgaggcgggcggatcacgaggtcaggagatcgagaccatcctggctaacacggtgaaaccccgtctctactaaaaatacaaaaaattagccgggcgtggtagcgggcgcctgtagtcccagctactcgggaggctgaggcaggagaatggcgtgaacccgggaggcggagcttgcagtgagcctagatcgcaccactgcactccagcctgggcgacagagcgagactccgtctcaaaaaaaaaaaaaaaaaaaaagagttcttttcaaaccttcctgtacaagtaaaatgagcacaagcactattttaatatctttatagctaaagataggtttttgctcttaaaatttccctaagcacatgtcttgtctttgctctgtgcatgcttgttgtatattagccagcttaagagcttttggaggagaaatgttcaaagacaatattgctgtccattgtagtggggcaagttggttttcttgtggtcacatttctttcttgacttcatttggcagattattgtgttcaaagacatgcatttagcagtgactgttaagttggacctttctttttcctacttctgtgggaaaggtttccatatgaatgtgcacctacccttgggttattagagtacatggccaccagctacaagcagcttctgatagcactggacaatgggaacaaaggaagttattggatgctgtcatcattcaaagttgaccaacatcttttttcagtgtctaaaatccaccacagagaatcctgccaactcccattgtaagacaaacttgctgtgaccatcatccatcttgacttgccatctaaagaattacaatgcagaaaacaaattcattttatctcacataccagctgatcagttggtagtgagctgccaaggttgaggactcaggctgcacgtggggtcagaaggcagtaactgtgatgggcactagaggggaaggggaagccctccttgctagtctcttcctctcccaagtttattttttgtttctggagccgagactgacatctttattttttatcatagacagaacaatggattgttggaagctgatgctgaaggaattaagtaggtactttgtatgtgtgcaaggaaggtttgaaattggatgaagaaaaatgtgtggactttgtgcactttgccctggccccttcaaaatgaaggtgacatacccacgaaacactgttcctgaggcatgtacatgttggtctctagacctcatctagactacttcctgctatctgccttctcttccttgactcttctggctccttgctgcctgctctctggtgaggatatgtatgtacaaagtagccttgtgggttactaggtccctgttgcttaatgatagttttaactgtctttccttgatcttgacctgtcttccatactatgttttaccttctagccccagaccgtgctgtgcatgggatggggtgggctggcctgacctgattatgcattacaggagaaaaattcaactgtcattttgattaggacttttagcaggtacatttctcagaattgcataaaggctgtagagtcacttttgcaaccagaaatgtgtatctttacgatctgcggatctacacagaatgtaattctgttaatgtgtatgtatgctgggggagagggatattaggggtgttctttctccaattctagtgaatggtagaatgataattatatgtatctagacaacacttcaaatatttcttatgttgctatcatgggtatcctgtaatttggaaagctgttcaccatttctatttatttccacagtaactttttcaagtagttttaaactgtcatggttaacaatcactgaactctgttcgttatattctgggcatatttttgacctgctttccatgcaagtcatcagattttaaggaacaggaaaagactggtcatggtgttgcaggcatcgcacttgctaaggaatataattagaagtaatgaatggaataataatacatcattatttataagaagtgtcatgtaattaactcaaataatgcagaatatattctaatttccatttggaatgaaaataggtttgtttgaacatcagtaggtagttacttattcttttatatttcatgcacatatcaaaactgttaaaatctactgagtacatatacgtggatttttttacaacagtcaaggtagctttcctctcctaatagtcttatgtatgttccttatttttattatatatacaaaatacgtatatgtgttcaactcttagaattagcataattaatttatatttattgcaaattaatgatctaatttatttacttagctgccatttcctttctcaaactaattaactgaaaaaataaccataaatttgcaaatagcttctgggcacaaatcctacattggacttatccttaaaaacctctacaataccagatatctgaagtagtttgcaatctaaactatctttgtgagatttctactacaggctttaaatatatttcaggagccttggtttagcttatatctgcctgcatttgggggtcaggatatgggtggatatgtcttaggcagtggagttatgtttatgtgtaacaattagtatgacaggtggtactgaccaatgtcaaaggtggttcctgaaagctctctactgtgccagacatcagcctattaatttgtgcattgtggggaggtctggagagtcccaggggaggaagaaaagaggtggtgagcagcacgcaagggtaataagtaatacttgtgtatttcaatattgtaataacaggaatagacatgccaatgcacatggtctcagtagattttagagggagattttagagggagaaaaacagatggaagaagctcctttatattcctaagaccaagcatgttctttgttcttcaagaccaattaagtcaagcatagttgtaggttagctgattaattaagaccaacagaactctttcttcgtatcaaatggtcatcttcctcacactgaacttagcctcctaatagtggtttaagggaaagcttacttgtagcatgggggatactgaggcaatttccttccttccttccttccttttttccttccttcctttcttttccttttgtatatgtgtttggggtaactgtggcagtggagagtatatttatatacatataactaatatcttacattaagataattttaaataattaaaattatattttatgactaacaatgcattattggagtcaatattttgtttcacacaggcacagtggtgcacacctgtaatcccagagttttgggaggctgaagcagggggatcacttgagaccaggagtttcagaccagcctaggcagcatagctagacccttttctacaagaaaagtttattggctaggtgtgatggcatgcatctgtagtcctaactactagggaggctgaggtaggaggattgctttagcccaggagttcaaggttatagtaagctgtgattgcacctctgcactctagcctgggctgcagagcaagaacctttctgaaacaaaaattgttctatcctcattggcctatgagtggtttgaatggaaaagctgaggcacagaccaatggtggctctagttcatgggagtctgggctttacccaggacttttgattctcattccattgttcatttcaccttctccagttacatttcacatatgctgcaaacttctatgtacggtggggtgggtgtcctgagaagttcttctccctagagtttaaacctttcccattagccccactttctagtgttgtattttcctaaatctttactctgccatttatatttttatgggcattttgctgttagtggctttattattttattgtaagcttcattatcatttaagaataagaccaaccttagtgacttctgaaagtctagaaggtttaagccttactctccactgccatctatatggggccaggcagtttagcttggttagccgcataatttgctctgagataaaatgggtccaggaggagctaaattcatctggctctccaatttttctcctttctgataggttttgaaatgcctgaagttatcaagaacttctttttatctttaagattaattttcagttcaagagatttacgtgctaatactttaaaagttagccatgatacccttccattcaccaaagatgattgctttaatagttgttaaataagatgtgtcaagataaaaataaatcaacaggaattacatgaaaatctagagtgtttcacatgcagaggcctagaataccagttagtattttctattctgtttagggaccaaatgactctagaagccatctctcagggagtcatatctgcagtaatgtaattgaagttcaggagtgcagcagatgttgagtgaaacttttcatatttccgcggaataaacagctaaggcctaagcaggaatgctgacatgtggggacagatgctccccacatccacattactgagaggcagcagcagaaccattcctacctcactgaaacatacctccacgcccccaaaccgcaaagggagaggatacgtgaggacaaagatcgacagttgaaatgaggagtgtagggatgctttcttcttccctcttctggaataattactcccactgcctcaaaagtcacatctcttgggggatgctttccacaaaatgacactggcatcttgttctttggcttgatgctacgaagctgtaggacctgcaggctgacacaggtactgtcatgatctgggagtgcagggaggtacaattgcttttggagagcttcccatgtgctctgtggagtttggaattgtacatgagcacacaagagtgcttgcttctcatctttgcattcttgaatgtagggtggggcaggggaggcttgttggagaggcctgtagtagcagagcaagaagtcactgaagaggagtagtgttcctgggaaaaaagatgagaacaacttttctacactatttcaccttttcggtagccctttgaagaagcccagaagcaccaacctcagcaggtcccccggttcctgtaaatgaccatgaatgtccgagtaggaggcaggcaccactaggttgctcaggtagatgctgggccaactgaggtgctggcctctccagagaggggattgggtcatggaacaccggcagacctaaaagggagacatggctgtccttttgtaaatggatcctcagaaacaaacgggggcgagactttactaccttcctggaaaaaacatgtctgttaattcaccagtgcagactaccgtatttgcagaggctcccagcagatggaactggagctagaccagggacacttacctgtcacctgtttgtgtgtgtgtgtgtgtgtgtgtgtatgtgttgtgtgtttcattttgtgtttttgtttttgagacagggtctcactctgtcatccaagctatagtgcagtggtacaaccttgactcactgcagccttgagctccaggactcaagtgatcttctcacctcagcctcctgaacagctgggactacaggtgtgggccaccacgcccagctaatttttgcattttttgtagagacaaggtttcaccatgttgctcaggctgatctcaaactcctgagctcaagcaatctacctcagcctcccaaagtgctggaattacaggcatgtgccaccacacctggccacctgtcacctgttgacaggcaacctgatacctaagaccactctgcctttaacgctagcatagcttagcctcactatgggggaacacttgtagagagctctaagtaataaaagttgcatctcaagtctgtgcttgataggatataaaattttaaaagaaccaagactagaattttaaaatggagagatttacaattatggaaagtgactacatagttatacgttctgcccaagatattattaaagagccagaaagggattcaacatagggtggctggaaaagtaatggcaaagaatataatggtagcacgtctttctcccactaagttgagattcttcaattattgtttacacaaagagatgacataaatcttaaaaaaaaggggttgtcagtcaataccacattaggtagggtgtgatcccttcaattcttagagtcagaatcttgtgtatattagatggttgataaatatttatgggataaatttaattttggttcaaaacaggatggttaggtagaggaatattcatttaattattaaatattttctgaagatctgtatatcaggttcttctcattttcatttctaatctaaatttggcatgctcttaagccaacaaagtatcaatgtaaggattaaatgctattggaacttttttgcatggcagcagccggagtgatcctgttaagacttgttgaatctatgtcacttctctcattatccccacagtggcttcctaccttcttctaactaaagccaaagttatcacagtgattgacaaggttcctacttgtactcctccatccaccccctgccatcaaccattgcccctctgatttcatctattaccatttttcctgtagtgagttgaatggggatccctcaaaagagatgtccatatctcaatccttgaaacctgtgaatggtaccttattaggaaaggggtctttgtggatgtgtgagttaagtatctcaccttgaggtggggagattatcctggatcagccaggcaaatcctacatccaatggcagtgtccttataagagtgagacagggagattacatggagaaaaggaggacacaacatgatcgtgaaggcagagactggagtgatgtggtcacaagtcaaggaatgctgacagccatcagaagctggagcagcaaagagggagcgtggccctgctgacacctggatgccacgctggcctccaaaaccatgacagcatcaatggctattgttttcagccaccaatttatggtaatttgttacagcagctacatacaactttcaaagctccccacattcgctcagatccaaccacactagattccttgttgtttgtttaacattctaagcacactgctgcctcatagcccttgaaccagcagctgtttattcttcgtggaatgccaattccccagatgtacatatgctatgttcactcaactccttcagacctctatttagattgtgctcaaatgtcacagaatagtctttcccattatcttaaaattgcacccctaccacatgacgttcctttgtagtgtttatacactaaattattatataatttatttgtgtgtgtgtgtgtgtgtgtgtgtgtgtgtgtgtgtgtgtgtctcaggctgactagaatgtgagctctctgagggcagggatgattctcaggtttattcatgaatgcatctcctctgcctgggcagggccaggctcataggaggtgttcagtaaatatttgttaaatgaatatttgctagatgagtgaccctggttgaccatgttggctttttagctctaaagataaaagaggacaacggtcctcatttaacaagtagaataatgtggtaagttctcacaccaggcagtatactgcaatggttaacatagtgtcaaccaggatttctatgtacctaacacacatgaacacatgcttggagacataactaatattcatcattccaaagtggcctgctttgaaagagagagaagtaacaggtggtttgagcatgaaaaatactcaacccctcccatgcccagcacaggtttcatagatttccatgtggattccagccaggctgatgaaatcagttatttcctcagctgagagaaatctaacagaagggtttgataactcgtcggctcatgagatttgatttcccaagattgtatatgccactgtcttgccttcctcaggaagtctggagcagctctgtaagcaatttcttcagtttagtcaagtttttatggctttatcatcttggcttcccatgcatacaggttgccttacataacatgcccttttgtagatctctatttctttctgatgatccctttgatgaaaccttcttctgatttattatttctataataatcaaggaaatttccattagacaattttagtttgtttattcatttatttcctagaatttttaaaacatgatttaaggtgactatgaaaaagtagagtaagatttaagtgctttaaaaaaaagcaaactacaaaattcaagaagtagtaaaaggaaagtaagatggaccaaaagtgagattagtgcatcaaatagatataaaatatttatatacttgctagagatagtgatatggtttggctgtgtgcccacccaaatctcatattgaattatagctcccataattcccacgtgttatgggagggagcccgtgggagataattgaatcacagggatggtttcccccatactgttcttgtggtaatgaataagtctcacgagatttgctgtttttataaggagtttcccctttcacttggctctcatttttccttttgcctgctgccgtgtaagatgtgccttttgacttctgccatgattgtgaggcctccccagccacgtggaactatgagtctattaaacctctttttctttataaattacccagtcttgggtgtgtctttagcagcctgaaaaccaacaaaaacagatgggtcacaaagttggccctgaactttctatcaccaacctaaataaggaaagagcatcaattcttgaggtaaaaataggctgattgttcagaaaaatgcagaaatgtgcacaacaccagagatcaggcgattttctgtgaattcttcctcaaggagatgatgccagaatatgtaattgacagcattctcaaaacatccttccaatgcacatggaggctgtttctcaaaaatatgttctgagtctggtactcaacatctctactactcctgccaaatcttgtctgaactgggtgcagtgagctctcaggtttccttgtttatcactcccgcaactccagtctaccactatccatcctccagtctaccactatgtagctgacatagatttttaaaaatacagaaacaagaacaggttgttcctttgcattaagaaattatggttgtttctggctgggcatagtgactcatgcctgtaatcccaacactttgggaggctgaggcaggtgatcacttgaggtcaggagttcgaaaccagcctggccaacatggtgaaaccctgtatctactaaaaatgcaaaacttagccaggtgtgctggtgggcacttttaatcccagcttctcaggaggctgagacacgataattgcttgaactcaggggggcagaagttgcagtgagctcagatcgtgccactgcacaaccagcctaggcaacagagcaagactctgtgtcagaaaaaaaaaaaaaaaaaacttctggttgctgttgctgtttctttcaattaaagtaaaatctgacattcctctgaccttcacctgccaccctctgacctacacagggtccctggttttcctcctttcaattcctgttcccttgtcatcacttacacacagaggccttccctgaccctaccacaaaactcaaaccatggaaatgatggttacaaggctctctcagtcctgtttctggtattgttgaatgtacatgggagaagaaagagctctgcctgccaatggctctactgcctcatttactgtctttgggtacaaaacatttgtacttgtcaaaactgcaaatgagctttggacagggaattggagaaatgtattttagtcccatatggggaaacttaggtcatttattcttttttgtttgatttgctcatgtgaagataaaggtattttctgctatgaaaacaggtatttgcctgcctcctgggctcttgtgagagaattaaaacaaggtgatatggaagtcagaagaatgaataaatttggcatattggaagcatggtataataattataacttttggccgggcacagtggctcatgcctgtaatcccagcactttgggaggccgaggtgggcggatcacgaagtcagcagatcgagaccatcctggctaacacggtgaaaccccgtctctactaaaaatacaaaaaattagctgggtgtggtggcgggcacctgtagtcccagctactcgggaggttgaggcaggagaatggcgtgaatccgggaggcggagcttgcagtgagccgagatcatgccattgcactccagcctgggagacagagcaagcctccgcctcaaaaaaaataataatacttattttttttttattgtccattatcctgatgccttaaggttgatcaagagcatgggtcttggaatggacattatataatggtagccctaaatttgtaaaactgaagcttaaatggaatttaaaaaaatactgcatttctatgtgaacatcacatagcaactggaaaaacccagactcaagtttaaattagtcatttaaaaatggcattaaaataacaccctggatttaaaataaaccaaaaaatttataggcatttgatatgagcctttttcctttttttttctcttctatgaggcatggtagtaaaaatcaaacccaaccaaacaaactcacctttattatttctactgtttttggtacttgggaagaggtaggtgtgtgaaaaatgctgctgttcattcatggcttagagttgctttgccatagtggttttaaattaaaccctcagggggtttagatgagtctagatgctcaactctcattaaccataatgggagttactctaagtgtctcgctcctccacccacaacattgaaaaatgaccctctaacaccatgttagtgtcctctttgaactaattttaatggattttttttttgaaagtgaagcatctctgcaatcctggggtcattgagactaccaacaattcagcaataagcagtagaccttcattttggagtgttcagcctgtacatgctggaaaggtttggactaggactgacatgctctctagacgagatgtttctcttttatttagtttcaaatcacactactgtttctttttaaaatctctttcatccacagctcagcctcctgatataatccgtacacaggaggtacggagcattaatgtagttctgatactactgaaatgttatggagaaaaggaattacagttgatccttggagagcacaggtttgaaatgtgtgggtccacttctgtggatttttttcaataagtatattagaaaaattttttggacatttgtgacaatttgaaaaaaaactagctagaaatatctaaaaaaagaataaatgtatgtcattaatatatgtagatactagtctgttctatcatttagtaccataaacacaaacaagcctaaaatttatcgaaacgtaggcacacaaacacagtctggacatggtgccacttgcagttgagaggaatataaagaaatataaagatggtgtatgaaatcataaatgcataaaattaactatagtacatactgtactataagaaatttgtagccaccttgtattgctattggggtgagctcaagtgttgggagtatctgtttaaaactcctcaggacactaatcatctctgagctgatggtcactccagtaaattgtttcacagtaaaaagtgatctctcatggttctcatttttctttgtgtgtgatgcataccataaacctggaatagtaccatgggactaacatgaagggtcactagtgatgctggacgtgctcccaagaagcagagaaaagccatgatgttacaagaaaaggttaaattccttgatatgtacctacagttttagacagatgattcatcttgtaaatagatgatgtcaagctatggtatcaatacatatagtataatactgtaaatgtcttttctcttccttatggttttcttaatattaatattttctctagtttactttaagaatacaatacataatacataaacaaaatatttgttaatcaagtgtttattggtaaggcttccagtcaacaatagtctactagtagttaagttttgggaagttaagttacatgtgaattttcaactatgcagatggggagtggtacaggatcacttgccccttaattgttcaagggccaactgtaaatatattcaaactatttggtgtttttaatgcagtctaccagtaaccagctaatgaattgcttgactaaataaacgttttgtttaaattatatctatgaagctgcagtctagtttatatcaagtgtaacccatttttaaacctttcatttattttttctaatcataagaatatctgcccactgtacaaaataaaaaccatctataatcttattttccagaaataacctttgccaaaactgcagtttattcctttctacttttttctttgttcttacatgtttctcttgaaaaagagaaacactttataacatgattttaacctacttcattgttgacatttttctgacgttttaatatgtatgtaaaaaataattgttttttagacagtctcactctgttgtccaggctagagtgcattggtgccacctcggtgctcactgcaacctccacctcctgggttcaagcaattctcctgcctcagcctcttgagtagctgggattacaggccaccatgcccagctaatttttgtatttttagtagagacgaagtttccccatgttggccaggctggtctcaaactcctggcctcaagcaatctgcctgcctctgcctcccatagtgcttggattacaggcatgagccagcgcacccagcctgcatataaatgaaatttttaacgatggtataatattgtgccatatggatctactataatttattagttattactgacttttcgacatatgtgtaacaaatattttggtacaggatctttggtaatgtttctgctaaatttcttaaactggaatcactacttgctataatattatgtggtgtttaaatggatgaacattcggaagttattgtatactagcactgcatgggggtacacatctcataaacttcaagaattaggttttttgttttggcctaaccttttccaagttgatagattttacatatctcactgtttacattttattatctaattgctagtggagttaacttttaaacatatatatacattacctttatcaataagttacctatgaaggtgctttgcttctttttctattgggatatttttaaaaacccaatatgttagagatcttttacgaattaaccctctacctgtcacatttgttgcaaatattgttccttttttggccctagcctcttcagtttctttaagatgttattaacatgtagaaattttgtcatagttttgtcaacttggtcatttatgagtttttcctgttcttttatgcaaaatctatcctgagattaaatatttgtgcgtattttcttgtgattttttttgaatgagttttctttcttctaatttttattttgctagtccactatcaccaacaagttcatggaacttcataggcatgctttaaaaattcactgtatcttcctggccacccttgaagaaggtaaagaatggtatttccaagtttataaatggagagaccaggagtgtcatgatgaaccgggcagtatggttctagaagcacagcggtgttttcacattctaactaacttctttacagaactcctaagttggtctttatactattaattgctagtttcacatgtttcctgcataggggtaatattgaaaagacagatcttggggattgtggcacaactataatgtgtcttctgagtcatgaaatgtactatattcaatatgacgttatggtgctgttttacattctagattatgtttaatataattttcatataaaatgctttctgcaatattgtaatttcttaaaaatgataagccatatatggcaattcccagttaaccaggccattggactgaagaccaccctttgaccgttgatgaagagcaaaaaattcatagtaatatcagtgggtcagccgcctgtagttttagggaggtgggtgtagagagacagaggaagtagctacttagtatcctatgattccgatgctatctaaaagacaactcatatttgatggagggaataaaatgtcaaagaatatgtgaaaggtatagtaggatgggatggaagaattttacatgtattgcatcatatatggcaataatataaataagaaagatatctacaacaagttgtgtgttctcaaatcacctcctgaatgacctttatcaatttttaaaaatgaaatagataaaaatttgcacaggtaaaaatatatttaacttaaccctaaaataacattaactcttgagcctttataactattcacccactttttgtcattaagagataccttggaatttgtcagcttaacaacttctcgacatgtttttatagccaaaatgcaacagaaattacattaaagaatttcccctgtctgatgtgactttgaacatgaaagggttttgaaaggatgttgctatccatcctcagaggagtagagattcaaatgattatgttttcttagctcccatgaagtcgaagtttgtatctcaattgatttctcaatttactgaagctcctattataattatccctattataacatgggtgtaattgatcactttcgctcaagtgatccctgtcattgtctcagctgtcagaatgtacaattcagtacagagacgttactctggcggagatgcttcttgcaaagccaggtcattttatttattcatctaacatataatatttatgctctgagattgttctaggcatttgataaatattaatttagcactcatgagcaaacctatcaggtgggtactgttggtatctccattttatagatgagagaatgagataatatgagctaaatcgatctagaccaaacagctattaagtggcagagccaggtttcaaatccaggtggtctaactctagagtcctttctctagaccagtggtcctggggccccggaaggtccccaagacctttgcagaatttgtgaagtagttccttttccaactatatgtctatatgaggccaacttcttcctatgctttagcgaagacatctcatgatagattgcatacagaagcagaaataaggatgcaattatcttctatcaagccattcattagagatttgtcactcttcacactagtttttttgttttagaaaatattattaaaatattacattaacatatgggtttattattttaagtaaatgaataaatattttagaattttcttagttctaacttggaattaaatatcagcaaatatagtcacataaattcaagctcttcggtgtagtcaatttttcaacagcgtgaagaggtacagagaccaacaggtttgtggataggtcctctgaacccatagtatgtttccccactcctttgtctcagctccagatttccctgccttccccgccttccccactatatcaacttgagtgttcacttaaaaatgtgagccttatttcctgaaggcaaaggtgatttttgcatacccagaggcagtattcatgggctgaggaatataagctttgcagctgagggcctggatgtgaatccaagctcagttgtcttacaagagcaagccctgggaattacttaacctagatttccttcagttaccttatgcttcaaatgggcggtaatagtatctacccagcggaattgttgtgaggatcatgtgagttaatatatgcaaaatgcttaaactctctctcgtccatatgaagcattcaaatataagctccattattgttaagtttctattgttatgagaattatagaagagtctaatgtgatttttgtgttctacaagttttcttaaagtttctcttatttccgtgaacattttttttttttttttaaattaaagcccaaacttccctttgtagcttgtttttcaaagcagagccaggtctatgacagtagccttgatcttaattgtgtggttagttctctttggggtgaggctactcttgaaatgcatttatcttcttgtaagcccataaatactgatattaatggtgtcattcctccttcctggacgaattccctcaatttcttgcatttcacgtcccgtaaatgtatagattttccttcctcctcctcccaccacatccagtggtgctgtttgtgttctgtgccagggacaggggcaggatctcctgccttgaaccgagctctgcagccttcctgccagctgcagtccacatcaggcctacagttggttttcttcccagcttccgctcacactaggatggaatattaccctcttataatggcttgtttatctagcagctctccctcggctccaggtcagaggctttcctccaggcaccactccgcgcctgcctgttcatttgcggtgcccactgttttgtctgcctgcctcaccttgtctgtcggaggtcactgtccctccagggaatgcggtaaccagctgcattttatctagtaaggtggcctctgctcacatgctcttgtgacagattacagcctggcttcccaccagggactcctctgagtgagacaccaaaggctgttgtcagtgtggctgttggtgggagagtcctcagtgtccaaagatacccttagcattttcatgtgtctgtaggaacgctttcatgtgacttctgtgtctcctgatggatctggaaagatttctctcctctcagagacttctaggttgtcttactgacattggaggcaaaatggcttatgataaacactggaggatttttgtcgttgttgttgttccaccacttataactcttgtttttattatcttttaaaactttaagttctgggatacatgtgcagcatgtgtgggtttgttacataggtcaacatgtgccatggtggttgctgcatctaccaacccgtcacctggtgttaagccctgcatgcattagctatttaacctgatgctctccttctccccacctcctcgacaggccccagtgaaacgggagctcccttgaccacttcgctggcaggaactgaagctgctagttttactcagcccactgctggccactccccacgggagggagcgtgcaaggaaacgggtgtgggaaccggagtgaaggaacactggaactgctggctgcttctctccagcagaagcaggccctgtgcatgccccatggcagcgtccaagtgtgttacaatgctcttttagccttgccatccacagacagcttaagtgttagccagctcagtgaagagtcagtgtgacagcctttttgggtttccacacccagtgcctcctgaattcttgtctggcatccaggaagaatcaggtcacacaaatggattgaagggtagtgtgtgcagaggattttattgggtgatgaaagtggatctcagcaggatggggagctggaaagggaatggagtgggaagataatcttcccttggagtaaggctgtccctggccaaacttctccccaacctagtctccgatgtccagctgcctcttgtcctctccacgttcagacacttctctcctcttctctcctgttctctgctctgccgctctgctgctcttctgctcatggagcgtggggtttggggttcttatgggcacaggatagggtgcagggcaggtcagagtggttttggaaaaggcaacatctgggcacaaaaacaagcatgcctattctcatttaaggccatgggtccaggcttgagagtagaaccctcaccagggacccttccctcctgcttcctgtccatatcaccagtgtgtattgttccctgtgtccatgtgttctcattgttcagctccctcttgtaagtgagaacatgtggtgtttggttttctgttcctgtgtgtgtttgctgaggataatgacatggacaaagctgaaagattggaggattttaaactccaaagggaatcttatctttgttatccttaactgaaaaatatttgccttttttatgtaggggaaaattattattaaatgttttgaactttgcttatttggaccactgtttctgccaataaagttttgagctgacttacaaaaacagagtacaacacatttatttttactgtaagtgagaaattgaggctgaagaaaaatacctgggaaattccatgggtggtctgtgtatataagattcagaataaaagtaaatagaatgtaaaaatttcaacctcagtaaagttgaaagaacagttcagtgatcacctgtttatctctcattgagattcattaactttgacatcttgatatatctgtgccgtgtctctgtagacacttcctttgtgccaaaccctctaacaaacagtagtctgctgcagatgttaggatgctttactcctaaataattcagcttgcattttccaagaataaggaaacattcctacacaactaaccccatttactgcacccaagaaaattcacattagttcagtaatatcatattttccatattcagattttctcaatttgctttctcagttggctttttttcctccatgacacagatccagtcaaggttcctaaattgcttttggttattcataaattaataaattgcatttggttattaaatattttaaaatatatatcaattgtctaactcccttggatattcatgacattaaattatttgaagattccaagccatatggcccatgcaacagcctactatcttgatccatctcattgttttctcctgattcggttcatttaaaccatttttggcaaggacaccaaataggttatgttgtccccttgcctctgcatcagtacatcctgtcaggctattggcatcactaatgacaatgccaagtttcaccatttggttagttgatgactgccagattaccccactgtaaaagacacagtttttttctttttaattattatatagtggggtgataatgcagttcaccattcatctgaaattcaaagacaaagctgaatttattgtaaaggagaactatgctggtcgagttcagtctgagtagaccaaagtggaaagtatggagttaagtagattttcagaagtaagtaagctgacatatgtggaaacatgttgattcaggtgaggagtggggcaggttgcttaattggcacttagagatgtatgagtctgttgctgactggctgtcttttagcaataaagggctgttactgattggttgactagaaagtgccaattaaatagactttaatctgattcaggatgctacttattaccatggctacatatcagtcaatcttttcctaggtttgctgtgacttgaattaatagacatgtcttgttccacaataagatttcccctaattgtttgttttagcatttgttggtgattctggcttgagtcatttataatatgggatatataagatgttagctttctatttttgtcgttctttcaacatatatttacagacattattctgtaaggaagaactttacctctcctcaatttttttagcccctttttgtctgttgctgtttctctctcatctagtaaactgagatcacttttaattcaaggtgttagaatccatttattatatcattttgattaaatttgcccaatttgacagcagaagtccctttattcagatgtctctgcccttttgagataaccctatttatctataagctgtcctcatttcctggcataacatactttccctgcttcagatctggaattagctatatggttcatttaaatagaagataattagaaaccaagatctgggcattaagtgtgctcatggctactcaggtgacattgtttctaggcccttctgttagaaaggactggaaaatatgtatacatatattttaaatcatggattgatgctgatacctccattaaaatccagcactatgggggtgcttcctctcattttatgtttatttttctcttctatttattctaagaccctatagtaccctcaaaataatttcagaattttaacatcaaaatttccaaatttttgattaaagataaatggtctgagttgaaagtgtctttagagataccttagatttttctctagttatagcttgattgtcttaaaacacataaagcgatgtttgtctgtgtagaaggagacattctgaagggtgtcgaccatttctgtatagctcagtactgatggaattggcataatggtggtaattataggtaatatttattgaaggattagtatatctccagcaccattctcagtacgatacatattttctctgttaatccttgtgaaaaccctttaagatagttaatattatcattttaatttcactgatggataaccttatgcaaagtctcactgaaagtaatgggcagacatgagactcacacctaggcattctgatgatagagtttagattcttgaccactctgctgtacatgtgttttacgtttttaataataaaatagctactcattattacctgcatttcccccatcatcagaacacttttcacccccttactggaatttattcttggtttgtcattaacattagatgtaagacctccgaggttagagactatgattctattatgtactattgaatttacaacatatactacattatatggtgcataaatgcacttactggatttttaataatggcactatagtcattcctatgtgccattgtgctaaaaccttaaatttaaatttaatattttggattcgtaattgtacaaattaggtatttctatattgtgtgtgtggggggaggtgggggagcaggttcaagaaggtaacatgattgcccacagcccttcagctagtaaataccagagacttgaactcacatctctgtcttggaagcctggtctttatcgtctcccatgagatctcattttctaatgaaattcttcctagtccatctagtcgatgctgaccctagtggaaggatacatatttgactagcttcacaaaaaatgagataaaaggccaaataggtccattatactcagcagatgctccattcaaattcaaggcctagaaatgatatgtagaagagagaatacttcttagggggtcctaaaattcctaaaggaaaacaaaaatgaatcatggccgtttaaactcttatagaaacttaacaataattggccttttttgggcttgcagaatatgtgaaattggatctgaattgcaggtgaattgcaaagtgcagctgttacccatcaatcctggcttaactatgcttggttttcagtgctgttctagttttccccactcgccaagatggccagctcaggcattgggtttccttttgctaccattggtttcctgtgttcttcatacctgacctttgttttatgaattccacagtatgttgctactgaagctgacattttattcattttccagagacaaaaataaagatggcaaaataagagtactagtaactctgggatgggcgctctttgtagtcaacctcaccaagctgtaggctgaagctgctagggtttgtatcactcattggaatctctgtgaatgataatgttggcaaaggttgagacggtagcaaggtttctttaccaggtacgtgatgtattcattgaaacaaaaaaactgtaagacaatgaaaaaatattttcttcctattccttagaaagactatatccataacgttaaagagacttattgggtagttttctctgaaaatgaaacagatcattgtcaacagaggatgaaagactagtctggattgcaagtgtagccacagaaatgtcatgtgaaggcaatatgaaaatgtaaatgtgcttagaggactaaagtggacatgctttccaagtcatctgtcacttgcgaatagcaaaatagcagatatagttaacatttcattgtaatttctaagtggtaggctaaggcaataaacaaatgttactgggctttttacaaattccatttgagatgtgatcataggaacagtataatgaatttattaagattatgaatgtggattcagtctaacagagatgtgaatcctaattcatctatttattatctgtgtgattttggacaacttgtcttatctgagaatcagcttctacttatgtaatagtacacaagattggaaagctatgggaagcaggtcatagactgaaatttgaaagctaagcacaaacaggcctcagaaataatagaagttggggcagctctgggtatcctggttgcggtaatgacagtctcctcaggatgctgccattgaagtgatgtagctccaaccatacatgtcctggtatcatttggaatcgccaagagtcacattcctggagcacgccatctgtttggcctgtcctggatctcttgcttggtagataaggtgttttatttgatagcctaccaggactgcttgcaatgggggagttgcaggtaccccaaaagaatttgggtgggaatataggaagagaagcttagctggtagacaccacagatatgtactatgtgggtctagagagggaatcttaaagcagtgatttgtgtctgtacatttatactatcacgttcgtctttacttcatcagccaggtgtagaattagttttttttaaaaccaaatatataggaatttggcatggtaacagctgtgtcttataattggctttttgagaagctaagctgtgatgccataagtacctactctaaagattgttgaaacacatctttgaactttaagatgtcaaagaaaacaccctcataatatacaaatctcacagatttggataagaattgatccaaataaatagaaggaatagaattcaagctagctcagagggtagtctttggcattttgaagtactttgtattatctatttttttgttttcaccttttccaaaaagatgacatagattatatggaaagagaaaaaacttgaactctccaatgaagtctaaattaatattcactcacttgtccaaagagttttcctaagattcacaagtttgacaaacatcatttatgctcacaccattattcagtaataacagtttccacctgtaactgtggtggcagggagttgaaattacctaccattatgggttattttcaagtagtcaaacctaattgataaattaagtcaaattcataatccagagacattatttcttagattccttctttattgtaagatctatcgcttcatggatagtagtactatagaacatccttctttttctaacatgcaatactgtattcacagtgctgatcttgctggttttacttcctaaatttcacaaatctatctatttctctaatttctaatgccagtgccctaatccaagccaccagcattcctcactcagcttatttattgtcttcactctacattccctgcaatacattctccatgtagctagcagtcagagctttatcaaacacaaactgatgaagaactccttactttatccccattgaaaaacctttgtcattctgctataaagacacatgcatgcatatgttcaccgaagcactattcacaatagcaaagatatagaatcaacctaaatgctcatcagtggtagactggataaagaaaatgttgtacatatacaccatggaatactatgcagccataaaaagaatgaaatcatgtcctttacaaggacatggatggagctggaggccattgtctttagcaaactaatgcaggaacaggaaagcaaataccacatgttctcacttataagtgggagttaaatgatgagaacacaaggacatatgggccgaggaaacaatgtatactggggcttatcagagggtggaagatggaaggagggagaggatcaggaaaaataactaacgggtactagacttaatacctgggtgatgaaataatctgtacaacaaaccgccatgacacgagtttacctatgtaactaacctaccctcgtacccctgagcttaaaatacaagttttgttgttgctgctgttgttgttgtaaaaaaacaaaatgaaacaaaacaaaacaaaaaacctttgctagcttcctttcgtacataggataaagaccctagcttttaaaacatggcctttaaaggcctctggtcttgcttcagtctttctctctaatctcaccacatgccaggcctccctctttctttcatgcccagccatactagcctctttcattcctccaccaaatcgtgtttcctttagccataggcctttgcatgttgtttctctcttgactggaatgtttttgcattgtctttttaccttgctaactcctgttcattctaccaatgccaactcacgtatcccttcttctagaagggctcttttgaaacctcagtcttggccactttcctttattatatgttctaatggaaccacatttctttccttgatagcatttacttgtttgtaattcacatgtgctagaatgatggtgcaatttccattttcttcctctagactatgagagcaggggcagtatatgcttttttttcactatagtaacttcagcactatgttttacacacactaaatcacaatttattaaatgaagtaattaagacttagggatagtatatccgtcagtttttatggggcaacaacctggaatcttggtagtttacaacaacatcattcattcttgttcacaaatctgcaggtcagctgtggctctgctggtcttggctgggctcagctggctttgggtctgctccattgtcttctcattccatttacgcaggctgaagaagcagcccctatctggaacattttgctcctatggtagagggcaggaggttagaaggccaacccagaccacacacatacgtttaaagcttcctttgggagggccgtgtgttatatccacttgtgatccattggccaaagcacatcacatgaccatcttgaaatcagtaaagcaaagtagtatactcctcccacgatgtaggagaagaggagaataaatatttgtgaagaaaatggtgccatctactatagatagtaaacacacttgtccgagattttcagacaaatgattatctgccttgtgtactgactctaaaaccgtggatttgccaaacacaatctctgtaatatagataatatatgataaataatttctccaaaggcaccagtgttcaggagttgcagtttacaaaattagctttatacttgttgctacagatcctatggaatacatccatcccttcccacctaccctccaccctcaaagtaccatgtgaaaaatagacatcaaccatgtgtgctatgtaaccagtgtttgtggactccttcattagtgcctaccatataaaaagaactgtaaaataacatggaaagctcaattatattgtctgtgagaaatcatgggaaaagactattaaattttcacattttactcatggctttgttgattaattgaaagaaaataagactaatgataaagttggtcatatttatgaaattgccacaaaatgaggagtcatcaaaccagacttttacaaatggcctaatagtttcttctacaaaaagcagaggtgggttggcatgaggaggccatatttggtaactgtggggttaatgttaccaaattcaagcttattaacattagaagaatgatgataatatagaagttgtcagaatttggaaagaggttttgtccgttggatgaaagaatgccattgcaataccaatggatgccaatgggatagcagaaatctaagagtttgtcaacatcttggccaagataatcagcaggggatttgggcagctttctgggatttaccacatgaaaaatagcaatcaaaaacagagcccaaataatatgtattcccaattcatagtctgattatcataaaatatgctggaagaaaccttggaggatgatctcctccagatgggaagcaaaggtgaaaagtgtaaatatgagagagaatgtgcgtctgtattagttacaaacggcttaaaaatatttctgtaactttgtcataagatgttttaaaagaagttttagggaaaattttctttctaataactaacatatcttttctatgaggcttttatatttagtaataacagctaccacttatttaattctgacttaatggccctttacacagatgctgaaagaagcctaggggtatggaagtaagctgtccacactcacccacctagtaagtagtgaagtcccaatataaatgagaccatcctaattgcaaaaatcatttccttaactacttagccatagcagaggcctggaaccagtcttgtttaggtagatgacctggtttagccttttatctattaaaataaaggaaggaaaaaaagtagtgggtttcagatagatttctgcccattattttgtttttttctgtttttacagctcatgatctaaataggaaaaaaaatacatctttgacaaatgtccaaaatagttctgacaaaacttttggggtgatagtgggcagggaagcaggtattccccttgtcccctgggacctgttggtttttcttgatgttgtcatgctgacgtatagcagtttgacttccactttgaacttaaaggtcagaatttgtgctttcagactattgaacataatgtagttgttcctattcctcaaactttgaaaaataattataaattaaatcactactaaatttcatttccacattgggcttactaccgggcagaaaggctacctgtgtagctaacagttacatgaccttaaggaaacattttatccttctcacaattaaaaaatcacatatttctaaagcatattttcttttgaattaattattttcttattttgttaatcactttctcctttggagctgcggttgaatacagcctgtccactatcgctgaagctctcaaagcttcatgagactccttcgatcaatatattgtatttggcagttcacgttttactatgttatacaattatatttaacaaattactgtgatgtgaaacatttgggttagaataataaataactttaaactacttactaagcagctttgttgaaccaaaaaaaaaatttttttttttttgagacggggtctcgttctgtcgccaggctggagtgcagtggagatcttggctcactgcaacctccaactcccaggttcaagtgattctcctgcctcagcctcccgagtagctgggattacaggcgcgtgccaccatgcccagctaatttttgtatttttagtagagacggggtttcaccatgttggccaggatggtctcgatctcctgacctcatgatctgcccgcctcggccgcccaaagtgctgggattacaggcgtgaggcacgctgcccggccaaaaaatctttttaagtgtgactgacattggtggctatcaatatggttggatgcttatatttagagaatatacttcacaattctttttttctggtcatttgagctatgtggtcatttatctgtgtagtaaaattaacgtcactttgtgatataatctggtgatacgtaaaataaggcttatttgctctttcttaaaatcaatactgcatgtatttattataaataaaatgagcaagaatttaatactgttaatttttttcatgcacaaaagtatgaagtaaaaagactcataatcctactgcccagagataatccctgttaatcttttaaaatgttttgttttcttccatcttctccaaaacagttttagataaaactagaacacaacactactctacatatagtatgatatccctttcttttgatcctaataccgtaagttttttcttattgtttaaagttaatgtttcttattcattaacttcattttcagtggtttcataatatttcatcaatatgattaactataattatttcacctggttttgaatatttagtttgtttcataactttcactattagaagtcatgccacaaccaatataaaatgtatgtgcccatacatttatcagttatttatattactgtatattacatgcatacacactcagtaattgtaggagtgaagtattcaaagaaaactgagacatagcatctttgctatcataggccttcttggataaggtacatacacataaattatgtaaatgttatgataataaatgtttgagatctcaatgagtggacatacaataaaatttcacatgtacccaaaagcaaagtggaaaaacattttgctactactcattgaatagtaataattttcctaatatatgctaattttataagtgagaatgtattatgctaatttgcattatttgattactagctaagaattattgagcattactatattttaaagttattttactgatgaagaaattgaggctcagataggtaagcagtttgaccaaagtcacacaactaaggaagagaacctagaactgatcacatgtttttctgattctgacacctatgttcttaaccaatacagcataaatgtagtttcgttgttttgttgcttctgagaagcattccaattttcttaatattcagtattcagctacagtaccatcaagtattactaatgtgtcacagtcaccatctaaataggagtaactaagttctggatgtgttttttctaacctttcaccaagtgaatttctaaggcttgaccatcttcctttctgccattttgatttttttataatagcatttttgatatatacttcacacaccgtgcaattcaccaatttaaagtgattttaatggcttttactatagtcatagtgttgtcgtcagccctcatgactacagacggttttgtcactgccattgggtttaggatctagctgtctgttctattgagtgcttaacacaatgtctggtacatggtaggcaataaataaaaaattatcaaatgattaaacaagatctttttatgatgcctgacattattgtgctaagcactgggggagttgctgacactctgtcctctagaactttgcaggatccttggagggttaagacctaaacccgcaagaaaagtaacttccgagtgaagtgtttgattagatgtcaaatgaggagaccagccaatgatttttattactgatgccacaggaagataaagagaatgctgtgccgtgcaaggtcattcaggacagctccttggagacaggggcttcttactggttcagttcatggtggcccaggtcttcctctatgaccactgagatgcaatgacttttggccagctttcaaagccttagtaatctttcccaggctgctgggattaataacttagaaggccatagttcttgctttactcttcctgtgttctaagatcttaggtcttaactgagagaagaacaaggtcctgggacacctctagagtgtgataactactatcactttttgtacttcctgcctcctctactggatccaaagaaggcaatttttcacatcactgacaacctagacccccttgattgcttctttctctgaaatcttgttgcatgtctactcatcggtctctcagtcatgggtcattgtatcatttgtttacatcatttatgcgtatgctgcttatcaaagaaccgcctggatggcaaagatgccacattttagcttttctttgagtacttcactcctacaagtactgagtgcgtaatatgcatgtgtatgcacgtaatatacagtaatatgaataactccaagtaaaacacacagtatcacttcgttacatttccaatagaggaaagtagtggttccaaaagttgatagctacttggtatttcttaatgtggatatatgatctcttgatctaaaataacagatttctaaaggaccgagcatcacctagggtgtttgttaaaatggagattccggactctgccatgatttctcactctaaggattctgaattcaaaagttgagcgtaggagccaggaagtggaactcaaaacaaaaagccagccactcccaaataattgtgacttccatctgtgagtcaactgtgagaggcattagcttagaccgtcaagatttggagaaataatatgcatcggttagtcataattggaagagctggcgtaaatgtgggttagtttggatcttttaaaagaaaaaatatctatagaactgagtattacaggggatagtattgcaactctgggagtctgtgactcaaattactgtttaaattttgtgtttatgtatctttgtaactcaaataagataaatagtggctacctacaacgagttatcaaaaaacattaaacgtatattgaaatctggctccttggatcatattacttcaagtcatccctgaaaaatgttggtgagaaatggtttctcagcctattttacagaatggcttgttctcaggtgagtgaatcagttttttgcccactaatttcacagattagcctgttagtccctctggctgaaagagtcaagttcacttcaattcagttcaacagatcttgactgttacttgctattaggttgggatggaaaagcaattgaggtttttgccattacttttattgtgaaaactgcagttacttttgcaccaaccgaatatgtgccaagccctgtgttagccaccggatataatgttttcttccaaaaagaagccaatcaaggcttgtatagtacttaccaggggccaggcactgtgttagttctttatgatttcagccagctgacctaatgaatagagcaccaatacaattttttttttttttttttttttttttagatggatgctcactctgtcacccaggctggagtgcagtggggtgatcttggctcactgcaacctctgcctcccgggttcaagcaattctcctgcctcagcctccctagtagctaggattacaggggtgcaccaccacaccctactaattttttttgtatttttagtagagatggggttttaccatgttgaccaggctggtctcaaactcctgacctcaaatgatccacccaccttggcctcctaaagtgctgggattacaggcgtgagccaccgtgcccagccacagcaccaatacaactcttgctaggtgatgcttacagttttaaaggagctttcttttgggccatagaattttaatctaaaagtgtttgaataaaaacacacaatggaccagaactcctttaaaagcaatgactgtactttattttatttatttgagaacatatactgtgtagtagaccaggagctagcaaactttttctgtaaatcttttctgggccatgtggtctctgttgtaactacaccactaggccattctagtgtgaaagcaacatcatcaattggtaaacgggcaaacagggctgtgttccaataaaactttatttacaaaaataggtatcaggcaggtttggctctagggccgtcatttgctgacctcaaattagacacagagttgtctattgtaaatgaatgaatatgtaaatttatcatttaattagtttctgctatgtgccagaccccaggtatacaataatgaatagtcagataacgatcctacttttattcttgtgtgcagaggtttaccataaaagatgaaacccataaatgtaaacccataaatcacaaacaacatgattttctattctgaataaaataaaaagaagagtatgattgagagtgagggactgcttgagacagagtggtagggaagtcttctctttgccggtgacacgtgctgtaagaactaacgaggagggaccagcccattgtgggacaatgggcagccaagtccaggtagaaggaaacaagaacaaaggctcaggggcagaaacaagtttgcatgctcaataatgtttaaaaaaacacagagaggccgggcgcggtggctcatgcctgtaatcccaggactttgggaggccgaggcgggcggatcacgaggtcaggagatcaaggccacggtgaaaccccgtctctactaaagatacaaaatattagccgggtgcggtggcgggcacttatagtcccagctactcgggaggctgaggcaggagagtcgcgtgaacccgggaggaggagcttaaagtgagccgagatctcgccactgccctccagcctgggcgacagagcgagactccgtttcaaaaacacgaagacctgtgggggtgaagcatggtgaggaagtgggaagatgctaggagtctggaaccagattaataaggccttctaaggacttcatttttgtgcagcaataaagctttggtgagatttaagaaaaagcagaagggtggaaggaaggaaaacaggatttttaatataaacattattttgctgcaaatcatttaagtatgcccacatcataccttgctatattcaccatcccccagccccaagggtccaggtcttgtagaggctctgtagaaacagtgaatggggagtttttatccccttcaactccttggtcactcatggaatctcgaagcaaagcaaacactatgaagcatttataggaactatagttcacatctatcacgctattgctttattcttacctttaagccaatgtcaagataacacatgaagtattccagatctttgttaaaagttcctggaatattttgttattcacaaaacattttacagcaacaaccaattaacaatacccttagaaaatcttggggctttttcttgagtttaaccacttttattttttttttaagttgagcttaaatttggtgtaaaagtgtatacagattaaatatctttgaagtaggtttttatttcacaggtcctagaatcaggtaaaatggtagttgctggtttcatttgaaggagtaattaaggtgtgtgatgttgtttaactgtttgttcaactttgcctagtgcagtggagtacaaatatttgaccttcttgacaaagacagatggattgaagctacacaccatgatatcattaggttgtcgaataacatcattattcatgattataaggaattattcaggtgaaatagcaaacctaatagaaagctattatttgtgttgggagtataatttcactgtccttgtcgttcccaacccttagttgaagatacaatatgtgtgtttattttcttataaggaatcattaatagcataatttaaactagtaaaattataattaataatttagtaaatcagggggtataacatacttccagaaagaagttagtatgctataaatgtaacaaatgaacattttcatcatttattgaattgtttcatttatataaattcatttttggtagtacaaaatttttacactgattaaaacatacataaaactttactttcaaagattggaggaaatgccttaaatttaaaatagtatttaaactggttgcatttttgctgtccatcttggtgttggcgaaactatggcttggagccaagtctagctccctgcctgtttctgtaactaaaggtttattggaacacagccacatttgttcctttatgtatcctctatggctgtttttgtgttacagtgacacagatgagtagctgtgacagagaccatatggcctgcaaagcccaaaatatttactatcttgccctttacagaaaaagtttgccatcctctgcactaaggaactaaaggaaaaaataaaattatgcactggttgatctcaaagttgtttgtaggaactactgaaacccatgaggttgggagaaatcagcatcctaagccatgtacttaaggaagcatgatggggtgtgtgatgcaagcccactgttctagatcatcagcttcttcagagaattgcctggaattattatgatctgctatataaccaggaaaggacggaattagctttctctgagctggttttagaatgttcttgcctgaaactgtaataatgaaatgatcctgtgatcctggatgaatcctgggttcttccacagtcttccttttatagctctgtgtagaacaaacactgaaaaaaagtgcaaatacgtttgatcgtgagtgtgagaatattgtttttccaaagatatatttatagaaataggctaataaaagaattatgtaattttcatcaaatttagaaattaactgtgtttgtttgcagaatgatttttatatttttgaactgattaaagagatatttcaaatataagaatgtacaaagaataatgtggcagtccttcttaaaaaatttaacatattttcatacatgcttcagatcttttcttagaatgaaaagttatagatacacttcatcttccccacctgtcatcttattctccttcctctgtttttagggctgcctttctcaaccttgtaaccattgccattttggaccagataactactttcttgtgggggctgtcctgtgcactgtaagtgtttagcagcaactctacctgtaccgaccagatacaataccatgccccctcctagttgtgaataacaaagaatatctccacatattgccacatgtgggaggcaaagttacccccttttgagaactgctttagaggcgtttactgacctgaagttggtaggttttctacctgcttaggtttgcatgtttttttttgttttttgtttttatttgtttttaatgtgcatctgtatccctaaaaaggaaatcatgttgtttgatgtatttaatattttcttgactgtgtcctgctgtacataatcagtttcttttactcggcattgtttttgagatacagctacatgaataaatgaagccctcattctttcatttttacctcctgtattgtattctagtccctgagtggaagacaaattaatttcctattcctttttaaaggttgtttctaatttttctcagttaagacgatgtaaaaccaatatctttgtatgtgtttcctagtgtactggtgagtctctctgtagaatatttacctagcagtggaatcaccatgttgtaaggtacacatttctccaacattggagagcagttctatagtcctaattaagtgcttgtgtcagttgatactccatagcattgggtgaaaacatctgtttcccatgatgtttgcattggcacactttttaagtgtttgccactctggtgggtaaaagatggtaccacattattggattaattctcatttctccaattatccagtggagtaaaacgtttgctcctggatgcaaacaggtgtccctttttgtcaattgcttgtgtgtattctttgccaattttttccattgggtcattgttttcttttgcaataattagtatttttatatattctagatttaaatcctttgtgatcatatccatcacaggacttttttttatttctcgcttggaatcttagtgggtttccatatgtgtgatggggtcgggacaggggatagtgcctttgatactaaaatgtttagtataatgaaatttaataatttccttttggtctatgcattttggctgtaccttaagaatatattcccagtgttaatatcataacagtactttcatatttttctaatgtattaatgttttcttttccatatgtgccttgatatcatctggatatcttttatatgtgatataaattatgaatctacttttcttcctatggaaaaacagtgttccattctattctttccccatggtcttgacataaatgtgtgaatctgtttcttgcctgtccactgagttcagttggtctctttgagctttaatgatacagtcctttgattactatgattaaagagtatctttatgtctagaaagacaagcattcctttcttttaatcacattttggctgttctttaccttgactctttcaaatgatttttttccgtcttgtcaaattctgtgggaaaaggccgtgaaattttttaaaggaatggcattgaatacatggattcatttatggaaatttgacatactgatgctgttggatatccccagttatgaacacaatgtaggtttccccctgttaggtcttttttttaatgcatatgtagaatcaagttccaatgtcaataatggcttggatttttaatttaaatggatatttgtcactgcctttttaatttggaaaaatctgggagtaaaaactcatatttgtttacctcataaacaataaacacaaagccccataaactttttggaatagttttgggaaaagaaaaatagaaaacagttgggaaatgaagtacttgaccatttcttctttaagagtattcccttaaagaagaattagagaatgtatttgttagaatgtacttgaagcatttgcttatgaaagaaaccatacactaaaaatagctaacaggcatatgaaaaggtgctcaacatccttcatcatcaaagaaatgcaaatcagaactacaacgagatatcatctcactccagttaaaatggcttatatccaaaagacagacagtaacaaatgctggcggggatgtagagaaaagggaacccttgtaccctgttggtgggaatgtaaattagtacagccactaaggagaacagtttggaggttactcagaaaactaaaagtagagctaacacacagtccagacatcccactgttggatatatacccaaaggaagtcagtatatcacagagcgatctgcgctcccgtgtttgttgcagcactgttcacaatagtcaagatttggaagcaacctaagtgtccatcggcagaggaatggatttaaaaaatgtggtacttaatcacaatggagtactatttatccacaaaaaagaatgagatcatgtcatttgcaacaacatgaatggaactggaggtcattctgcgaagtgaaataagtcaggcctagaaagacaaatattgtatgttctcacttatttgtaggatctaaaaatcgaaacaattcaactaatagagatagtaagtagaaggagtattaccagaagctgggaaggatagttgacaggtggtgggcagggaggtgtgggtatggttaatgagtacaaaaaaatagaaaacatgaataagacctagtatttgatagcgcaacggagtgactgtagtcagtaatgatttaattgtacattttgaaataactaagagtataatttgattgtttgtaacacaaaggataaatgcttgaggggatggataccccattttacatgatgtgattattacacattgcatgtctgtatcaaaacatgtcatgtaccccataaatatatacaactatgtacctacaaaaataaaaattaaaactatacactaaaagtcgcatattatgtgatacaatttatgtgaaatatccagaattggcaaagtcatagaggtagcagattagtggtaccaggggttaggagtgggtagtggggaatgtagaatggctgtaatggccacagagttttcttttgggatgatgaaaacattctggaaacagatatggtgaaagttgcatgacattgtgaatgtacaaaatgccactgaattttacactttaaaatgattgatgaattttgttatgtgaatgttattacaactttatgtatttgagtatatgtcatttattaatggacaaagatacattctgtaatttgtctacctccctcttgatctgaaaaaactacaaagcatgtctcaattctaatgcaaagtcttaaccaaaatgattttttctgagctattcatatttagcttctggtgactcacaggaacctgaattttatgttccattcaacactccattatgctcttaaatgagaatctaataattttcccttggaatatttttgaaatccaattctaagtatttagaattttagacacagtcgtatctctcgtttgaatattccaaatattgaactttgttcaacattgtttcaatttgcaatatttatgggttgtcaaaacaaaagtagagatttttttctttatgtccatgtctaaaaatgtcattttggaaatggcaataaaatagagcattaaactgaaattaatatcatgatgttgaaggtgtgacctaattaaaatgcaaatgtaagcacacttctttaaaattgacattgcagcttatatattccccaatagtgggactattgcttgttgataatttgatttgacaggttctcttcacaggttcatttctttaacctcacagtgtaagcatatattggcttgcctgataagatgagaaaatttaggcagattcaggaaggttaaaatgaaatttaatgagttatgatcttccttggatataggctgattctacttattagaggaatttggaaaatgcctaccatctacagatttaagcattgttgaaagtctgtattttaaacttaaaactcacgtcataggcactttttgtccttgtgtgtattgtccttaagtcaatttcatgttgtgccctttacccaaaaatacccttatttcttttactcctctaaattccagttgacctttataaagtcttcccttgcccttttctcgacaagtaagaaccattttctctgaattcttgatttgtatttctccttggcacttatccatcaattctacgctgttttataattagtgggtatacatgtactgtgtcctgttttattaggtctttaagaatgggagttactcgcccagagcaaataaagattaactggcacatagtaggaagcccaaaaggaaccagtgaagcaacagaagatagagtgaatgaataaagacacatgaatgcactaaatcttttgtgcacatggcttttactgattttcacctgtaatgtcctataaggctatagacagtcaaactaaaaaattgctgtcattgggagagaggcgggtggatcacctgaggtcaggagttcaagaccagcctgaccaacatggagaaaccccgtctctactaaaaatacaaaaattagccaggcatgatggtgggcgcctgtaatctcaattacttgggagactgaggcaggcgaatcgcttgaacctgggaggtggcggttgcagtgagccgagatcacaccattgcactccagcctgggcaacagagtgagactccatctcaaaaaaaaaaaaaaaatgccatctttcattctttaatagtgattattgcacatttactagtttatgaagccaattcttgcaccttaagaagtatttatgacctagatttcttaacctttttcctatatatccaaatctttcaattaactctgaaggatgagtgtaattttaaataccaaattctaatgctcaaatgtgagaaacaattatttgactttgtgaccacagaaagacatcaatattttaaatgctgaatgtttgtattttcagatagctactgttgtcttgcagttatgttgcctgttccttccacataagcatcatatagtaaaatttagttttagtaaagaatctgtgggaaaagtagacttgaacacaataggatttttaaagattatgtgaacaagtgagtggaaataggatacttaagaaatacaacacattaattttcaagaatatttatgtccgagatgtcaacattccaccaggatagtttttggaggataatagctctgagcgagattgtttcacataaacgaggttagaaagttctttatttgaaatgaaatggaagattttatgctagccaaacatgtaatgctactttaagcaaacttttcatattctaaatacaaatattaaatcaaatattgttataatggaacatttcattgtgtttctgttgtaaaaaaaaatttaaggaaataaataacaacataaagacaaaattggtagcctaccccaaatatttcagttatttgtgtaaaggttttcttatcttcactagctgatggttataaaatgaaatgcgtttaaatccatggctaaaaatgattaaaatatcatacagaacgaaagcactccagctgtagatgttcattaaattgaccattaataacttgtgatataaaggaatattactgcattcataaattttgtatgcagattttattaagctggcatgttatatgaattgattgtctgacatcttctggctgtggctgaagataatagtgttttatatgcatttttcataatccaagaattctgatggactgtttctaggtagttattatgtttttgttctggttggccttttttttttcacccagtttacaattagaaaatataattgtagcttttcgtatgaaacattataaggttggttgtgtcagcatttctattataaccctgtttttcatagggctgctagtatgtgtgtaagggagtgggtgtgtggagagagaaactacatcggtttggttgactctattttgtcttgctaatgaattattgccatttctttcttgaaatgtaaatagacttgtttgctattgcttaataaaaatcatatttcagtagcttattgtttacctttcagatctgagcttatttaataggtcttttaacctgtttctaatgcacaactcagcaccatttggttttgtgggtttggtactgcaaggagggcttgagtgcaacatatactttttgggttaccagatctagtttatttgcttctcagcatatcatacttttattttgcaattaccttttgtcttcagaggtagaggaaaggtagcacaaaggtcaaagcatcgaccagactgccttagttaggggcccaaattggctacctgtgcaagttacttaacatctttatacctgtatcctcacctgcaaagtagcatgatgctactatctaccctgtagggttgttttgggaatttgttaaatcatgtgaagggcttagagcaaaataagcactcagtaaataccaactgtttttagtacctgaattagtaagagacagaagacgtgaaactgaaatctaatcttttttttttttttttggtacaaatcaagtaagacatgataatgaaattactgcctgaatctttgaggctgctttggatatagtttatcccctgaatttcctccatgttgaagtctgtggagacggagcaagaggtttaaaagagacacctgggctggagtagttacagttttggattggggaaaataaatttaagccttctcacttttgtaaaatggagataattatggtaaataaataataggttgttatatattttttaaaaagcaaaatggaatgtctagcacacatacgagttcagtagctatagtgtctctgtggtacctataacagatgtgcacagaacccataacacattttgttaactaaggtgagagtttattttgaagcagtaacgatgtctaatgtaacatctttttaactaccttctactagatgttatgaaaatattagatgatcacccttgtcttggctttataaacacaaacagtgtaagattagattaaaccatgtttgtggcttataaaaacattatggatatttatcatctttgcctgtgattaccgaattgctagtagaatattgtttcttggtgttgatttgtttaattccgagttacagcactttgccatgtccctgtattttgaaattcattgctcattttggtcaaaagtagccttgttaaatgtgaaagctgtaaggatgatttcctgcctgtcatgtcgtacatgaagagcactgaggtacagtttataacagaacttggagtaataaaaactccaagcagatgacttggtttggagcctcctgttcagtgcctgggaaacttgaaggatttcttcatactttttggccatttgtgagtatggcagtcttttggctatgaaaacaggcacaggccctcctgccaaaactgaaaaagacattagggtgagcctaatgaaacctaggcagagatccccaaaaattaccacattgactgctgtttcttttgcaataatagttcaaaaacttgttattctaatttagatgtgcagagaatctttatctaaagcaggcagatgttcttattggtattgtagtgagcagtagcatggtgtaagcaggtgtgagtgataagtggacttgagcacaggtggctttaatgtatgcagggtcaatgctataggctccttaggccaaacagttgtaagctagattctagagcactccagcttggtcttagtcatgatgtctttaattcagtgggcttttaaaaatttaaactttgttaaaaggagtttaagttatgctccattaagttggacattattggaagccaggattttgttgctttctcagaaataaaaagtatacacacacattttaaaatgagatcatatgtacatttctgtgccctctaaaggagatttgccacctctgtgaattgcaacttgagctggatttttaaaaatttccaattaggattgatgcctctgagtaaaacgaataggtactattatgttagaactctgtttctattatagagagaaataataatagtatttgcttaaagggggataatatttttctaatgaatgctatttattaaatattgtgacaaaatgtctactttttagcactgctcatggtctctcttggaaatcccaactcattggacatcatctggttcaatccttgacccatgatggaaatctctgtagcagaaagtgtggaatatatgaattaaaactgaaaagggattccaaaaggtggaatagattttgttcatttgcagtcattgaaattattcagcaaaatattatagtttcatgttttacataaaaacttaacaccaagtttttatcttgattttccttctggctgttagataactggtctttctctcaatctattgaacttgatagagaaagttagataattctatagcatattatttagctggagagctgcctgaatatagggcttggacttaaatatttatgtatactaggcaacataggactgctgaggttctgtttagtcacactggtaattaaaagattgaaatatttctattgtacatagctattgctctgagaatatcccctaccctgctgtcataggccctccctcatggcccccagacctttctaagcaaccacagaaccaatgtctagatcctcaagaccccgctccagtgacactgtcagcttctaggtaacccaccttttacttaacatgacttctgaatagtcctacagtgactgttggttgagtaaatacagggttacttggaatcagatacaagagaaaagtatcttgaagccctgttaagaggttttctaaacttcagaatcgaaggtaaacaccaaatcacagcatacatgagccaggcctacaataatgctatggtgcctggaacacactaggaacataacaggggctcagtaaatatgtcgatggaccgagcatctcaaatataatcttttagctcaatcacaggagtcgagtgattgtttagcaggtccctgctgctgtggtttcctcatcatttaacaaaggtttatatttaaatcgtaagaccattgcacttccctttatgctttaagtagctgcacgggccttgtcaggattttcttttttagccttgccttccttcatagaacatctgcatttggatcacagaatgttggcttcacagatggtcttgtaaatagctgaataaagaacctttaatacttggcatttataacaggtacttagaagtttcatcgaaattctatttgctttggctggagaaatacattctcttggtaatgaacttgaactctgtcacctggttatatctttgagataacagaataggatagacggaattaggaggaaagattgctgtataaataggtgagcattaaagacttcatcatctctgacttgtcaaggaatgagctaaactcaggacttactattttgtatgattaaaatgtgatgatgaagtgttttgaatttctgataggcttatttccctgcgttagcaactttgagatagtcaggcactgcaggaagctccaagcacggagtaattgaaaggcaagttcaagatagattacattcagcctgttgaagtatacataactgtacctattaattgctgcaccaaagatctgcattttgttcaaaccatcttgaaagaatgtgacttcggagatgagccttccaggtgtcgtagagcagaatgtagaagtctctcaattgttgctttcatggatggatcccctacttggataatatttccacatttgatgtttctgactttgagcagtaatcacacttaagaagaatgataattgtgcaactgcaggagcctgcctgagtaagtttctcattctaccttaaggagcttccgagagctgctcagtgtgttcttgcttatgctttccttcacgaggctcttacatttgtgcccacgtgctgggtacagagacagcaatgggagtgtagagcagcactttaacttgcctagtgaagtctcttactcagtcccttactagccaggttcttgcgatcaagtcaccaaacctttctgcagattgtgatgactattcgattcaatcaaacccaaagagatcagccaagagtctggcacacagaaattccttaacaaatattagttcttatgtatcctacaccttgtgtttatagcaagccagtctgcttgtggcagggttacttagaaatcatttgacagtgtctaaacagtcactcccaaagttgttgaaaaattgacagtctgtagttgcattttgtaatgtttcttttagagcaatagggcagtggttttaactgaagcacgtttaaactgactttgttttgagaaattttagtggcattactaagaatttttggatcaaagatcacgtttattggtgagaggatatccgttgaaagataaaatatgcattataacatgtctttttgataaggagaagtgttttggctttgttcatcaaaagtacatctttgaagctgatatttgaagttattaagatttactagcatctggaatattaccttcaataattaatggaggagacatcagagcctgcccttctctgacctatagatctttagctatcagtgaaagaactgatggtatgcaatgctttctttgcctaacctgtcaggcccctttggaggtatcctaaatttgctgatggatcctaaactgactgattaatgtttgatgttaggagctttggggaattgttcaagggattatggttgtttgtagtgcacaggaaatacagactttttatgatcagttcagctctttttgtgatcctctattttatgactagataatgcttttgtgaaaaaagaatgaagtacatctgacatatggcttgatctttctcttcctctaattaaaaaacaaaaacaaaataaaattttttattggaaattctagccctgaattacctgttttctattattgtttatatactctctcattttaagtgttgtgtaaatatttactgtatcctctatcaaattgaggaaatggtgtctttttcagttcctattagagtggacagcatatattagttagtagaaataggcattgtgaggaggcttttctgtaacaggtgtgcagaagtgtcttctataatgtgccacttcatgctgatcaatatagtcttagacaaatgactattgatagggaaactgttctttgaaataaccatatctttgactccaaagtagacttttcatttattttttctctgatctcactgcaattagtaattagtaattataggttggggtctgtatatgaaaagatgaacaatccgtgggtccttaattattcaaggaatttcaaggtgtttgattctagagagttgtccatttctttatttaaaaaaaattttactttagattccaggatacacgtgcagaacatgcaggtttgttacataggtatacgtgtgccatggtggtttgctgcacctattgacctgttgtctaagttccctccccttgccccccacccccaacaggccttggtgtgtgttgttcccctccctgtgtccatgtattctcattgttcagctcccacttatgagtgagaacatgtggtgtttggttttctgttctttgttagtttgctgaggatgatggcttccagcttcttccatgtccctgcaaaggacatgatctcattcctttatatgtctgcatagtattccatggtgtatatgcaccacgttttctttatccagtctatcattgatgggcatttgagttggttctgagtctttgctattgtaaatggcgctgcactaaacataagtgtgcatgtgtctttatagtagaatgatttatattcctttgggcatatacctggtaatgggattgctgggtcaagtggtatttctgttctagatccttgaggaatcactatactgtcttcccacagaggttgaattaatttacattcccaccaacagtgtaaaagcattctaatttctccacagcctcaccagcatctgttgtttcttggtttttcagtactcaccattctgactgacttcagatggtatctcattatggttttgatttgcatttctctgatgatcagtgatgttgagctttttttcatatgtttgttggttatgtaaatgtctccttttaagaaatgtctgttcatatcctttgcccactttttgatggggttgtttttttcttgtaaatttgtttaagttccttgtaagttctggatattagacatttgtcagatgcgtagattgcaaaaattttctcccattctgtagattgcctgttcactctgatgatagtttctttagctgtacagaagctctttagtttagttagatcccatttgtcaattttgacctttgttgcaattgcttttggcattttcgtcatgaagtctttgcccaatggtattgcctaggttttgttctacggtttttatagttttgggttttacatttaagtctttaatccatcttgagttaatttttgtataaggtgtaaggaaggggtccagtttcagttttctgcatatggctagccagttttcccagaaccatttattgaataagaaatcctttccccattgcttgtttttgtcaggtttgttgaagatcagatggttatagatgagtggttttatttctgaggcctctgttctgttccattggtctatatctctgttttgataccagtaccatgctgttttggttactgtagccttgtagtatagtttgaagccaggtagcctgatacctccagctttattctttttgcttaggattgtcttggctatacagaggtcttcatagattccatatgaaatttaaagtagtgttttctaattttgtgagggatgtcaatagtagtttgagaataacattgaatctgtaaattactttgggcagtatggccattttcatgatactgattccttctatccatgaggatggaaggttgtccaatttgttttctcttatttccttgagcagtggtttgtagttctccttgaagaggtccttcacatcccctgttagctgttttcctaggtatttattctctttgtagcaattgtgaatgggagttcattcatgatttggctctctgcttgtctattgttggtgtaaaggaatgcttgtgatttttgcacattgattttgtatcctgagactttactgaaattgcttatcagtttaaggagtttgggggctgagatgatggggttttctaaaaataaaatcatgtaatctctaaacagagacaatttaacttcctctcttcctatgcgaatactctttatttctttctcttgcctgattgccctggccagaactttcaatactatgttgaataggagtggtgagagagggtgtccttgtttgtatcagtttttaaagagaatgcttccaggttttacccattcaatatgatattagctatgggtttttcataagtagctcttattattttgagatatgtcccatcaaaacctactttattgacagtttttaacacgaagggatgttgaatattatcaaaggctttttctgcatctattgagataatcatgtggtttttgtctttggttctgtttatgtgatagattacgtttattgagttgcgtatgttgaaccaccattgaatcccaggaatgaagctgacttgatcgtggtggataagttttttgatgtgctgctagatttggtttgccagtattttacagaggattttcgcattgatgctcatcagggatattggcctacagtttcttttttcactgtgtctcctcctggttttggcatcagggtgatgctggcttcataaaatgacttagggaggagtccctgcttttcaactgtttggaatagtttcagaaggaatgacaccagttcctctttgtacctctggtagaatttggctgtgaatccatgtggccttgggctttttttggtcagtagactgttaattactgcctcaatttcagaacttattattggtctgttcaaggattcaactccttcctggtttagtcttgggagggggtatgtgtcccagaatttatccatttcttctagattttctagtttgtttgcatagaggtgtttatagtattcacttatggtagtttgtatttctgtggtgtcagtggtgatatccctattatcatttttttattgtgtgtatttgattcttctctcttttcttctttattaatctagcttgctgtctattttttatttttttcaagaaaaccagctcttgtcttcatttattttatttttggagggttttttgtgtctctatctccttcagttctgctctgatcttagttatttcttgtcttctgctggcttttggatttttttctcttgcctctctagctcttttaattgtgatgttagggtgttgatttgagatctttctagctttctgatgtgagcatttagtgctacaaattttcctcttaacactgggacactctgtgtcccggagattctgatatgttgtctctttgttctcattggtttcaaagaacttcttgatttccgccttaattccattatttacccaggattcactcaggatcatgttgttcaatttccatgtaattgtgtggttttgagtgagtttcttaatcatgagttctaatttgattgcactgtggtcctagagactgttatgatttcagttcttttgcatttgctgaggagtgttttacttcaaattatgtggtcgattttagaataatgccacgtggaactgagaagaatgtgtattctgttgcgttggggtagggagttctgtagctgtctattaggtccgcttgatccagagccctccagagctgagtttatgtcctgaatatcctcattaattttctgtcttgttgatctaatattaacagtatggtgttaaagtctcccactattattgtgtgggagtctaagtctctttgtaggtctgtaagaacttgttttatgaatctcagtgcttctgtattggttgcatacatatttagaatacttagctctccttgttcaattgttccctttaccattatgtaataaccttctttgtcttttttgatctttgttggtttaaagtttgttttgtcagagactaggactgcaagctctgctttcttttgctttctatttgcttggtaaattttcctccattcctttattttgagtctatttgtgtctttgtgtgtgagatgggtctcctgaacacagcacactgatgggtcttgactctttatccaatttgccagtctgtgtcttttaattggcgcatttaacccatttacatttaaggttcgtattgttatgtgtgaatttgatcctgtcatgatgatgctatctagttattttgcatactatttgatgcaatttcttcatagtgccattgttctttatattttggtgtgtttttgcagcagctggtacttgtttctcctttccttatttagtgcttctttcagaatctcatgcaaggcaggcctggtggtgatgaaatccctcagcatttgcttgtctggaaaggattttatttctcttatgcttatgaagtttagtttggctggatatgaaattctgggttgaaaattcttctctttaagaatgctgaatattggcccccagtctcttctggcatgtagagtttctgctgagaggtccactgttagtctcatgggattccctttgttggtgacctggcctttctctctggctgcccttaacattctttccttcatttcaaccttggagaatctgatgattatgtgtcttggggttgctcttcttctggagtatcttagtggtgttctctgaattttctgaatttgcatgttggtctgtcttgctaggttggggaagctctcctggataatatcctgaagtgtgttttccagcttgtttccgttcttcccatccccttcaggtactccaatcagttgtagattcagtctttttatgaagtcccatatttcttggaggttttgttcactcctcttcattcttttttctctagtcttgtggaactctttgggaatttccacctagatataaaaggatgtatggaaatgcctggatgtccaggcggaattctactgcaggggcagagccctcatggaaaacctctgctagggcagtacaaaggggaaatgtggggttggcacccccaaacagagtccccacacagagtccccactggggcactgcctagtggagctgtgagaagagggccaccatcctctagaccccagaatggtagatccaccaacagcttgcactgtgcacctggaaaagccaaagacactcaacgacagctgtgaaagcagccgttggggagttgggggagaggggtgtaccctgcagagtcagagaggtagagctgcccaaggccctgggatccctcttcctgcatgagcatgccctggatttgatccatggagtcagaggagatcattttggagctttaagatttaatgactgcctcactgggtttcggatttgcatgggacctgtgtccccttagttttggccaatttctctcatttgtaatgggaacatttacccaatgcctgtatatccccattgtatcttgtaagtaactaacttgtttttgagtttacaggttcctaagtggaagggacttgccttgtcttagatgagattttggatgtgaacttttgtgttaatgctagaatgagttaagactttggggaactgttgggaaggcatgattgccttttgaaatgtgcaaaggacatgagatttgagagggaccagcactggaatgatttggtttggctgtcttgccattcaaatctcctcttgaattgtaatccccagatgttgagggagagacctggagagaggtgattggatcagtttcccccatgctgttctcatgatagtgagggagttctcatgagatgtggttatttgataagtctccggactctcccctgctggttttctctctctttctctcctgccactgtgggagacataccttgctttctctttgccttctgccgtgattgtaagtttcctgaggcctccccaaccatgtggaactgtgagtcaattaagcctcttctcttcataaagtacccagtctctggtaatatctttattgcattgtgaaaatggactaatacaacatcaaccagtatagccacgtattatcattatcaagtattatgtactttacgtcagtagcccccaacctttttggcaccagggactggtttcatggaagacaattattcaacagacaggggtcatgggggatggacagttttggaatgaaactgttttacctcagatattcaggcattagttagattctcataaggagcatgcaacctagatccctcgcatgtgcaattcacaatagggttcatgcttctatcagaatctaataccgactctgatctgacaggaggtagagctcaggcagtaatgctcactcacccactgctcacctcccactgtactaacaggccacagatgggcactgatctgcagccagggggttggggacccctgctgtacctaatatgcaatacttttatatgactggcagcacaggttcatttataccagcatcactgcaaacacataagtaatgtcttgtgctatgtcattaagacagctaggatgtcactaagcaataggaattttccagatacattataatcttataggaccaccatcatatatccagtaaattgactaaaatgtcattacgtggtgcatgactgtatatatttatgacccttcctctccctccccaaccataggttttccatgcctcttgaccattgtgttttggatcaattggtatgatagtcatctcctaggacactcaaaactttgtttctgaatatttgcaaatgcttttgggcatcactgcataacactgtaactttgatgtcagttaagggacaaagtcatattttctttcttcctttgagaatcaataatgtgatcatacttgcagagaaaggcacgtctgaaccatgggcaagcagtacattattttcaaatctcttttctccctaaggcccctcaagtctagtcctctttgacagtttcatcatgaatgttctacagtgttgctgtcctgggcaaccttagaaaagttccatggaaaacaatataattaatacagtgtcttttactggatcccatctgtaattcccagagcaatagttatattgcgtttcatttcaatagcacactctgtgctatgtggcttggatttgatatgtggtgtgattatactctctgtgtcattgggaattttgagtttgtcttttatgaatactttttctgtgccttcaacatacttttatttcatgtatttgttcatttgtgcaaaaaaatggagcaccttttatgtctaaaatgttttacaaggtaagtgaagcagcatgcaatatagtgggagaaaaaggttatatgtaatgactgtatcataatgcctggcacataaatggtggtgattttagtggcatccttaccctgctgctcttgaagctgtcatcatcatcatcatcaccaccatcaccatgatcgttactcttctcatacttctgccagatgcattctattgtttttttatgtaaagtgcactttctttgccgcaagaggcactaagaaatgacataatcatagttaggtctagagatggtaacacagtcctatcaaagcctactttgttttcagtaaatgaagttcattcatatttgcttgattccgtttcccttgaatttgttggctaggattattccccgatacattggccagcaaaagacccaggttagttaaccaattgtttggaagggccctggctgtgcagtcacactgcctgaggttaattcctggttcccaattttggtagctgtgtgaacttcctttgtctcatttcttcatctgtaagtgggatgcataaggttactgctgattattggaagaattatgtttggtagtgaaatagggcgcttatccagtgcctggcatattatgagcaatcagtatgtcaatgctgtagtttttattgttgctctaattgttgttattatttttgttagtacttttgttgcaattattattttctgctgtgaagaccaatttcctattacccagcaaagaatctccacgcttctctatggtatgcactttctccttccaggggtgagcaagcagaactcaaactagaccaagataattcacctttcattcgtactatgaacagggtgaaaaagtgttgctccctatcatattagagaagtttgggtaaaatcattataggttctgaattgatgatgatgagctctctgccctccttccaagataaaaatgtttactatggtctctacctgattcctgagacaaatgcaagtttgtgttctatacatgtttatatctacatgcctataccgattgtttacatatgtatataaaaggttaagttaatcttttggcatgaaattcatctaccagaaaaataatatgtgattatttgcagtagatctaaaatgcagacattaatatgaaactttttaacagtagcactgttctcactgagctgtgtggagatctatagaaattattacatagtgtggttagtgtgatgcctggcaagagagtacacattcagtatgcataagctagtaatgatgtcagagaagacttaatagaaaacccagcaaaagaaatccaaaggcaggcataaacactcaaatcctctctctgcatctctctcaaaagaaaagtagatgatcaaaggaaaagaatgaaatattttctcatgctcttagtagccttcattttgtgtacaagccattttcctggtttttgttatattcaaggttatgtataaaaagattctgaccaggaaattgcattagaataagaactgaaaaaaaaaaatccattttgaagacctcaggtagttaaaattgttcctccttcctcaccgtgggttaatgacagacttgcttttaattcattgcttatttttgtaggaaaaaaaggtggtgattgtttgaatatgatattataatactttgcttaaaagtactgaactatattcagcatatgcatgtaaacgaaactgtatatacgtacttaaacatatacaaaccatacatatatatatatatagtttgttctgtttatggtaatgttgagctttacctgagccaagtattttggaaaatagcactaggtgaagaaatcccccaccctttgtcttctggaaaaggcttcttaaaaaaaaaaaaaatccttccccgggtgtccaggacgagaccaaatgatgctcacttaagtacctccgacaaggccagaagctgagttttcacattcccgttctgcgccttataaatggtcagctgatttgtttatacccagtgcccaaataatcaaccaaacttcagtcaggtgtgtctcgctccctaggcccttgaactttgaccatgccttcagcattgggatgcagagcagcctctccttgaatacccctcctgagaaccagctgaccttcaggagaagctttccctagtcagtgctcccagctgatctttctagccttgcttacccctccctataaaagaaaattcctttctgcccaatcgttgagctacttgcacatctcatgaccagagctctccctattgcagtagtctcactccccttatagcagttactttttcaaataaagtttctcttatgtctggatttggttttaactggacgtttgcgtttattccccctgtggcctgtacctgttgcctagtttgagttcttaaagcgccttcatactaacagtaataggaacttcctgtgttccagtctctccatgtggtacttttgacacattagctctatttttctgtctcataccagggaaatatttttatttatattttacactcagggacactgaggctcaggtacgttaaataactttgcaaatggtgcatatctcctcaatgagagatgtagacttggaagatttctgtgactgcacagccatcagtttttctactatctcacttctattaactctttggggtcacagttactataaaaaccagtaatgatgatgacagctctactatttcgggaattgtatgccagttcttgtgccaagttccctgtgtgttatttcccacataatacacaatactttgtggcatgcttgtgtagggaaatctgggcatgagtggaaaagatacgctgaaggggactggaagggcctttttccccttggagactcttaataaactgtgttatgcaactgcattttgattatgacccatcacatgaggtcaggggtggaattttccacttgtggcgtcagctcagcactcaagaagtgtcagatttgggagcatttcagatattgggtatttggtgtaggggtgcttaacctgtatttacatgaaagaaacgtgaggtttgagcaagttggctgattggcccaggcccatgaagttgacaggtatcaaagtgatgacaaaactgataccctgcaccttgtgaatttctgcaaactacctgggtccctgggttgtagcccctccagtgcctacatcagctgctgcagttttaagcgcacaagtgcacctccaattcatcagtccttgtttgctttgccagtatgagtttctctaaagatggagctttggtttcaaagtaataatcacagtattcaatctattttctgtttatgttgagattaatgtttatcacttaaataaatgattgaatagggaaagaatgtttttcaaacctgtggcatgcatcatttcagctaagggagaaaaacatttaagttactgagttacttaactcccctaacctttgctttgtctccttttcagtacaatggacatctcaagatacctactttatagaaatgtagtgaagattaaagagatgaacaaagagtctctggcccagtgcctggcacatagtaaaacacttcgacagttgctacagcaactagtagtaattctaataagagtttttcgttttcccccaagctatctgtttatatcaaaggagtattttgtatatttctgacatgagctaagttctaaagtaagtaatggcagataactcaacctggttcattgtattaataacagtcagttgtatttgtgatttaagtagtactatttaaaaattggaattgtattgtgttggccaggtgcggtggctcacgcctgtaatcccagcactctgagaggctgaggtgggcagatcaggttaggtcaggagtttgagaacagcctgagcaacatggagaaacctcgtctctactaaaaatacaaaagtagctgggtgtggtggcaggcgcctgtaatcccagctactcgggaggctgaggcaggagaatctcttgaacccgggaggcagaggttgtggtgagccgagattgtgccactgcactccagcctgggtgataagagcgaaactccatctcaaaaaaaaaaaaaattgtattgtgttgaaaataatacatttgtgaaaatgagcctcctaagctttacttctactgttttgaaaatgtagttaatgatttcttgcctaattattaataaattcaaaaactgcaataaaaaatgaatattgtagaatttctagaacactccaaaactactcatcaatttagctctataaaattgaactgtaaacatgactggtgtttttattatatatgagtgtgacagaagccctttggggcttcatctattctctgttgctatattcagttgatttaagattctgaggcttattttttcattaattctgaatttttcaagttaatgtaatatgaacacatgttccttttcccatggatgaaaaaataagcttaatgaagaaaattatttaggctttgctataccagaagaaactctagcctttggtgctggtgcagtcagggttgaccctccctgccctctgtctgcttcatctccttcatcttccttgattgctgggtaagcagacacattccctgtcctgattgtgtcactgctggtattaggatgaaaaatgcatcagaatttatgaagatgtctttttttctagttctgagtatgaggttctttaaatgtttccaaaataatgtgtctttcccccatacatctccaggtacaattctctgtgaggttaggttttctttttttcttttttttttggaaatggagtctcgctctgtcacccaggccagagtgcaatggcgtgatctcagctcactgcaacctcctcctcccgggttcaagtaattctcctgcctcggcctcctgagtagctgggactatacaggtgcatgctgccacgcctggctaatttttattgtattttagtagagacggggtttcactgtgttgcccaggctggtctcgaactcctgagctgaggcaatctaccaacctttgcctcccaaagtgctaggattacaggcgtgagccactgcgcccagctgaggttaagttttcatgtgcaagtacctcaaatcagtatttccaaagaaaattttttgccaccaaagcaccacctttgtagttagccctattggttaatggccttttcattgtcatgtattttaagcctggcaatatttttctcccttctcccaggttgtctcttcacattgtatttattctctcttgataatgtctctcacattcccctttctatttccacatccatatcctaaattcagattgtccctctctcttgaaatatgttgaataggttcttaattgagctccccacctccagctcccctcagccctttagttaatcttggaacagtgctcatgcaaattaagtgctttaattactctttgatttgaattgaattttatcgaagaagccagctatctgtggatatggagttttcagcgttggttcatatcttaacagcaacaccttgagagcagagtagtaccactttcaagtgcatatacctatttgtcaaaatttctttgcatcatttactgtaactcacttcggtttgtaatcaacataatagcttttcctttttcaaacttttttttaaagcaaaggatcaactctgggacatgcatttcattggttttaaaagttctcagtctctggaaaatgaatataataagaaacatttctataatatagcactaaaggagataaatgtcaggttgtcagaaaacttaaatgaataatggtatttgaggcatttgtttttcttgcaaattgagatacgataattactgctatttaaattctccacccccacccccaacttggttttgcttagatgtctttgggattgggggctttgggacacacaagtcatttttctctcctgtcagaagttctttaaggattaaaaacaatttttattttctctatgagaaaccaaagcatgtaaagttgaaaggcagcaaagacgagcgctgcttttaaaacagcattgtacatggctcatgcctgtaatcccagccctttgggaggccgagacgggcggatcatgaggtcaggagatcgagaccatcctggctaacatgatgaaaccctgtctctactacaaacacaaaaaaattagcccggcgaggtggcaggtgcctgtagtcccagctactcggtaggctgaggcaggagaatggcgtgaacctgggaagtggagcttgcagtgagccgagatcacgccactgcactccagcctgggcaacaaagcaagacttcgtctcaaaaaaaaaaaaaaaaatacagcattgtacaatactttgcaaaatgaaggtgggcatgtagtttgaagacatgcaaacctttataaaataaaaaagtgggcatacagttcgaagtaataaatgggcctaaggacctaaggatgaaccagttgtttttgcctcattgaaatgcttttttcttaaatatatatctttcctcttgctgttgtttttgctcttttttttttttaacaaaaaagtagactgagagctactagtgcagttacgttacgtggatatattgtgtagtggtgatgtctgggctttaagtgtacccatcacttgaatagtgaacattgtacccaataggtagtatttcatccctcaccccaaaattgatttaaaagatgaaaactcactatgtaattgtggcatgcaattaggttaataagttattaaaaatatgatcattcatgtcagcctaatctctttatttgaaatatgactctgttcatcttacagttcaacatgggaagattccatggccatgcttagcgtgaaggctttttactcatttcaagaatgtgagaggggtggggtggcagggggaagacagagcaagatggccaaattgaagcctgcagtggttgttccccggcagaaacaccaaattgaacaactgtacatacaaaaaagtaccttcataagaacaaaagaccaggtgggtgattgcagtatctggttttaacagtatattaaggaaagaggcactgaagagggtagaaaagacagtcttgaatggttgatgtcaccattccgccattctcctgcacagtccatgagacgtggagaaagaatctttgtgcttgggggaaggagagtgcagtgattgtgggactttgtattgtaactcagtgttgccctgtcacagtagaaagcaacaccaggaagaactcagcaggttcccaaggagggagcatttagaccagccctagccagaggcaaattgtccatgccaatggtcagaacctgagttccggcaagctccaccaccacaggctaaagtgctctgaagttctaaataaacttgaaaggcagtctaggccacaaggactgcaaggaaagtcctggtcctgtactgagctcagaaccagtggacctggggtacacatgacctaagaagatatcagctggtgaagggagtgcttgagctgctccccactaactctaggcaacacagctcacagctccaggcagctccttcttccctttgtttcagaagaggagaggagagagtaaagaggatattgttttgcaacttggatactagttcagccatagtagcatagggcaccaggcagagtcctgaggcctctgttctaggccttggcttccagacagcgtttctaaacataccctgagctggaagagaacctgctgccttgaatgaagggagggactcagttcttgcagagtgcatcacctgctaaccgaagagcactgggccctgaataatcagcagtgatagccaagcagtacttgctgcaggccttgagtgagactcagagccctgctggcttcagttgtgaacagcacattcccagctgtggtggctacagggagagatcccttctgcttgaggaaaagagagggaaaagtaaagaggactttatcttgccgcttgggtaccagtttggccacagtatggcagaggatcaagtgggctcctaggatctctgatttcaggatttggctcctgaatgacattcctggacctgtcctgggccagaggaaagacaacttccctgaggagagagactcaggactggcagcattcaccacaagctcactgaagagcccttggacctcgagtgaatgtcattggtagccaggcaatactctccatgtgcccggagcagtggtggtcagagagattcctctgcttgaggaaaggagagggaagggcagaaaggactttgtcttatggtttgggtgccagcttagctgcggtagaatagagcaccaagtagatttctaaatttcccaactccaggccgtgactcccagaaaacatctctggacctgaccagagccagagagaacttactgccctgaagggaaggacacaagcctggcaggatttcccatatacttattgcagaacccttgggacttgagttaacataggtggtagccaggcagtaattgttgtaggccttgggtgagacccagtgttaggctggcttcatttctgacccaatatagtcccagtggcggtggccacaggagtgcttgtgtcacccctcccacagcttcaggcagctctggagagagagagagagagagagaaagaaagagagaggagaggggagagagacagagagacagagacagatttcatctgtttggagggaagtaagggatgagaacaagagtctctgcctggtaatccagggaattcttctggaagttacccaagaccaccacggtggtatctgtacaagcctgcaatagccacagtgttattgggcttggggcacccctaaagtagaaacgggtaaagtgaccaaaaacttagatgactacacccatgtcccttcaaatacctggaaagccttcccaaggataggcagaaacaagcccagactgaaaagactacagtgaatacctaactcttcaaaacccagacactgacaaacacccaaagcatcaagaccttccagaaaaacatgacctcaccaaactaagtcacctgtagccaatcctggagagagagagagatatgtgagctttcagaaagggaattcaaaatagctgttttgaagaagctcagtggaatccaagataacacagagaaggagttcagagttgtattagacaaatctaatgaagagagggagatataaagaatcaagcagagattctggagctgaaaaatgcagctggcctactgaagaatgcatcagagtctgttaatagcagaaataagcaaaacaaagaattagtgagcttgaagacaagctgtttgaaaatacacagtcagaggagacaaaagagaaaagaatacaaaacaatgaagcatgcctgcagaatctacaaaatagcctcaaaagggcaatctaagagttattggccttaaagaggaggcagagagagagagagaaaagttaattcaaagggataacagaaaacttccaaaacctagagaaagatatcaatatttaagtacaggaaggtaatagaacactaagcagatttaacccaaataagactatctcatggcatttaatgaactcccaaaggtcaaagataaagaaaggatcctaaaagcagcaagagaaaagaaataacaaagatctccaaaatgtatggcagcagatgtttcagtggaaatcttacaagccaggagagagtgatattacatatttaaagtactcaaggaaaaaaaatcttctaacctacaatagtatatccagtgaaaatatccttcaaacatgtatatttaggagaaataaagactttcccagacaaacaaaacaccagaactatcctgcaagaaatgctaaaggattctttcttcaatctgaaagaaaaggatgttaatgagtaataaaaaactatctgaaagtagaaaacttactggtaatagtaagtacacagaaaaataaagaatatcataacactattgtagtatgtaaactactcatatcttgagtggaaagactaaacaatgaatctatcaaaaataataaccacaacttttcaagacatagatagtatgatataaacagaaacaacaaaaagttaaaaagcaggggtatgaaaagtatagtgtttttattagtttaattgtttatgcaatcagtgttgtcatctgtttaatataatgggttacaagatgttatttgcaagcctcacagtacactcaaagcaaaaacttaaaacagatctagaaaaaataaaaaagcaagcaataaaaacatatcacttgagaaaatcaccttcattaaaaggaagacaggaaggaatgaaagaagaaagagaagactacaaaacaaccagaaaacaaataacaaaatagcaggagtaaatcctattcatcaataataacattgaatgtaaatggactaaactctaatcgaaagatgtagagtggctgaatggataaataaaactagctgcaatgatctgttgcctgcaagaacacacttcgcctataatataaagacacacatagactaaaaataaagagatatggaagaagatgttgcatgaaaatagaaaccaaaaagagcaggaggagctatgcttatatcagacaaaatagccttcaagacaaaaactatggtaagagacaaagaaggtcattatatgacaaaggggtcaattcagcaagagatataacaattgtaaatatatatgcacccaacactggagcactcatatatgttatgtaaagttattattagataagaccccaatacaataatagctggagacttcacccactgtcagcattggaaatatcatccagacagaaagtcagcaaacatcttacttaatctgcagtacagaccaaatggacctaatagacatttacagaacattttatccaatggctgcagagtacacattcttcagctcatggatcattctcgaggaaagaccatatttcaggccacaaaacaaatcttaaaacatttttttaaaaattatgtcaaatatcttctctgaccaccatggaataaaattagaaatcaataacagctgaaattttggaaattatacaaacacatggaaattaaacaatatgcttctgaatgaccagtgggtcaatgaaaaaattaagaaaattttaaaaatatattgaaacaaatgaaaatggaaacgcaatgtatcaaaacctatgagatatggtgaaagcagtattcagaggaaagtttatagtagtaattgcctacatcaaaaagtagaaaaactaatgatacattttaaacaactagaaaagcaagtgaaaaccagacccaaaattagtagaaggaaaaataaagatcagagcagaaataaatgaaattgaaatgaaaaaatacaaaaggtaaatgaaacaaaaagttgtttttttgaaaaaagaaatcaaattgacaaatcttcagaaaaaaagagaagacccaaataaaattagagatgaaaaaggagacattacaattgatatcatagaaattcaaagatcattagaagatactgtgagctactatataccaataaattggaaaacctagaagaaatggatatgtttctagacacacacaacctaccaagattgaaccactaagaaatgcaaaacctgaacagacgaagtaatgagatcaatgccataatgaagtcgctcagcaaagaaaagcgctagatttgatggcttaactgctgaattttagcaaatgcgtaaagaaccactaataccaatgctactcaaactgtttcataaaactgatgaggaaggaatacttgcagattcattctaggaggctagtatcaccctgatacaaaaaccagacaaaggcacattaaaaaaaaaaaaaaaaaactgcaggcaagtaaccctgatgaatatagatgcaaaaatcctcaacaaaatactaacaaactgaattcagcaacacattaaaaaaagcatttatcatgaccaagcgggatttattccagttacgcaaggatggttcaacatatgcaaatcaatcaatgatacatcatatgaacacaaggacaaaaacgatatgattatttcaatttttgctgaaaaagcatttcataaaattcaacatcctttcatgattaaaaacccacagaaactgtgtatagaaggaacataccttgacacaataaaagccatatatgacagacccacagctaatatagtgaaggggaaacacctgaaggttttctccctacaatctgaaatgagacaaacatgctcactttcaccactgttattcaacatagtactggaagtcatagctagagaaatcagacaagagaaagatataaagggtatccaagttggatgtcaaattatccttgtttgcagatgatacgatcttatatttggaaaaatctaaagactctaccaaaaaactattagaactgataaacaaattgagtacagttgcaagatataaaaatcaacatacaaaaatcagtagcatttttatatgccaacagtggacaatctgaaaaataattcaagaaagtaattccatttacaataactacaaatcaactacctaggaataaacttaaccagagaagtgaaagatgtccacagtgaaatctataaaacattgatgtaaaaaattgaagaggacacaagataaatggaaagatattccatgttcatggtttggaagaatcaatactgttaaaatgcccattctatccaaagcaatctgcagattcaatgcaatccatataaaaataccaatgacattcttcatgaaaatagaaaaaaataatcttagcatttacataataccacaaaagacccagaatagctaaagctatcctgagcaaaaagtactggaggaatcacattatctgacttcaaattatactacagagatatagtaaccaaaacagcatggtactggcataaaaacagacacatagaccaatggaacactatagaggacccagaaataaatccatacatctacagcaaactcattttcaacaaagttgccaagaatatgcattgaggaaaacacaatctcttcagtaagtggtgctgggaaaactgaatatctatatgcagaagaataaaactagacccctatctcttgccatatacaaaaatcaaatcaaaatggattaaagacttaaatataagacctcaaactatgaaacttctacaagaagacactgggggaactctccaggacattggtcttggcaaagatttcttgagtaataccctacaaacacagttaaccaaagcaaaaatggacaaatgggatagcttaagttaaaaagcttctgcatagcaaagtaaacaaatttgaagagcaaatttgaaagcaatttgaagagacaactcacagaatgggagaaaatatttgcaaactattcatctgacaaggggttaataaccaaaatatataaggagctcaaacaattccataggaaaaaaaatctaataatctgattaaaaaatgagcagagatctggatagacatttctcaaaagaaacatacaaatggcaaatatatgaaaaggttctcaacataactgatcatcagagaaatgcaaatcaaaactacagtaatatcccagttaaaatggcttattgaagaggacacaaaataatgaaaagatatgcaaaagacaggcaataacaagtgctggagaggacgttgagaaaagtgaactctcatacattgttggtgggaatgtaaattagtacaaccactgtggaggacagtttggaggttactcaaaagactaaagagctaccatatgatccagcaaactcgctgctaggtatatacccaaaagaaaggaaatcagtgtattgaagagctatctgtacccccgtgtttattgcagcattgttcacactagccaagatttggaagcaacctaagtgtccctaacagaggaatggataaagaaaatatgatacatatacacaatggagtactattcagctataaaaaagaatgatatcttgtcatttgcaacaacctggatggaactggaggtcattgtgttaagtgaaataagccaggcacagaaagacaaacatcacatgttctcacttctttgtgagaactaaaaatttaaaacaactgagctcacggaaagagagagtagaaggattgttaccagaagctgggaagggtagttggggagggggagatggttaatgcatacacagatgttgttacatatgatgtataagatctagtatttgatagcataacagggtgactacagtcaacagtaatttgttgtacattttaaaatagcttaaaaatatgataggattgtttgtaacacaaaggataaatgcttgagatgatgtatatcccatttaccctacgtgattattatgtattgtattcctgcatcaaaatatcccttgtaccccataaatgtacctacaacatatcttatatgtacccacaacaattttttaaaaaaatgaatgcaggggaacctagaaatacctagttcttttccttgagtcaagccttttgagcaagagacaagatcttttagtgaactcagttctgccatagtgttgctatggtggttttacttgtttacttctgttttttcacaggatttcaaggcatattaggatgttatgatgatgattccaaactgtgcaaataaagggcaaattacatgttcttccacaaaaggagcttctgttatccctctttgccacacacttgctagaatggccaaagtagttgttattttcttaaagttaaactgattcgtggataataattaacagctgctatcattaacctttattgtgtcaggccctgtgccaattatttaatcttaccacaacagggtaaggtacatattgtgattgtctccattttacataagttaacactgatgcccagagaagttaagtaaattgcccaaagccagagtttcaactggtctaagtttttttgattggaaaccatgtctattttctgggcaacttctctgggcatgctataacctcccacatggacagcttggcaagttcatgccttattacagtttgaaatgttacacgtccccttcctttccccagtaaatgatgggtttcctagacgttttatttctctgttctgagaaggagaaatggaaggaggagaaaggatggcgggggagaggagtaatgtgtatatttagtcactatcaatgacattttagggccaatagggccaactgaaacagagttctgcccacagttagtgtttcattggttagccttatgtgattaaatccttctaaatgcaattaaatccttatcaaccaaaagaagaaaaattatgttctctttagggaaataagtatagatatatcattttccttagatttgtgaactatttcttcagaaaaccaaagctgattcccaagagacaagaaaaacaggatttttttttccttctcaacatttacatgaaataacacctaagtactttaaagtgtgaacacatgtcccatggtactcaatgatgtgatatatctgttgccttctgccacctacaaatgaagaaaagattttgaagagagtaacatcatttttaaactttcttatttgtgaagttcccttgccatgctaaagcctgaggagccaatgcattgcctccaggtggtgaatgttgggtagaaattagctggagcagctgctccctcagtgtggcacagcacagaggtggtcagtgcacatcaggctgtgacaatatgaccaggaatacatggagtgatacagagcagggttggttttgtgtcggcctgcctattgggaggactgtgccatgactgtgtagatacagccagaaaagtcttttggactcacaagtattagcccagtgatctccctgcagcatgccctcagtggctccccagctgtcttagcccggtccagcatggttggcaccttcctgtctttccttgtccgcctggggccataacctcctgtttgccaccctcctatgttctctgtcctgatgggctgaattctagtcctcctgctctccaagccctttatcctggcggatctcttgcttttgctcctacctcgatgctcttccctcctctcttcactaccctgctttccgctctcagctcctgcattaattcctcagtggtgttctccctgccttggtcagatcctctaattatacattcttttcacaccccatgcctttctgtcgaggacttgccctaggtgcatttgacatttgggttcttacagtgtttgggagaggaggtagggttgagtggttgagccatgggcactcaagccataccgttggcttcaaaccaaacttggccacttagcaaccttgccaactctgtgcctcagtggctcctctgtaaaaggggagtgatcactgtacctcattcttaaaggtgtggtggagagtaaatgagttgatattagaacggcagctgatgtctagaatgggcttactgcatggtagctctctttaatatttgatgtaatgatcatccttccattagattgtgaactccaggcagacaagggctataactgtttttgttgcataacatccccccggtcctgctgaaatgcctcactcactgtggggcacccattcagtgttagtttttactgtgtaccagcactgagtcaggcgaactgaagacttcaacctcggtttcaaccggtagtctgtcataggatttacagattcatgtaacgctcttgacagggatggttatagtttttacctggcttaaaggggggcgggggttccctttttttaaaatcaatttcaatcttatttggaagctcagtgtatcaaacacattcaaaatagaggtgctttgcttaggaaagagcatggcttgtttgggatcccccatccttatcctgcctctgactgcctctggaaacctttgccctaaataatgatggtctgctttctaaggctattgggtgagagaccaacttggaatgcttaataagcaagcatggaagtaacttgcagaagaaaaaagacttcagccttttaatgtcaaaaatatcaaatagggaataatttcaagtggtgatgtcagggacagctgcgttgtctgtacagcgttggagagaagatcctgcttcggcatagcctatgattttgaaggctactctatagctgccacctttcatcttaaagaaaaaggattttaattatgacaatgagaacaagatgacatattgttttattagttgcttaattttatttagctgactcacttagtatgggaatgtctctaggggctgctggagagtctctttctataaaaggagagagatcccaagaggcagatttgtttaagagtgttgcataatgtgctctacgtcttgggtttctaccattctcaggttatgaactgtagagctggatttttttggtaatttttctaatcaaaaggaaaatcaataaggctcactactgaataacatatttaataacttgataaaataatcagagtttttggcacttacagaattagattaaataaagattttatttttcagtgtgaagaaaaaatttttattagttaccatagtgaaatgggaagagtatttttttgccgttaacgttaagggagttttcttaaagaaagtgttctgtgccagggttgttacatatggtattctcttttgttattttttaaacttaaccttaaaatatatttcctttaaatagattcctaagtttgggactgatgactaaggttcccttaaatttgtacgtacttaagttgattcactacttccaacatgaattatattctgaacaaggaaagaaaaaatatttagctgttatgggccatctggctttaaaatgtagagaattgtcttccagcctgcatctattttagagtgactattggatcagaattccaatgaatctgaaacagtagattcacaaattaaactttaatgctttgaggattgtaaatcacagcacatgtggggtgatacatgttttgggagagatggatcctcctgacccacatgtaaaaaattaaagctgtctgtattctgtgtttattgaatgtatttattttaccaaggtggatctgaataaacagtttctaggtttataatattattgggattttttaaaactaaaaaattcgtttagttgaattatgcaatataaatccttagcaatatccccaaaaagtttttccaaagaagtaatattggttcttgatgtttcctcatggttcttttttttttaaccaatataaaagcaaattttaaaaaaaggtgttatttcccttggaaggaagctgtgattcccatggttggttattagtccaaagccgtggaacttctttccttataaacctctcattctggcaagacaggacacttggacaatgattttcctaataagtataaccaaaagactttccctaattttaatgtttcccaaaataagtcctcatcagatttgccccccgaaaggtaagtgaggaaagttcaagacaagtttgatagacatatttgttgaagacatttcttaatttcagattttttgatatgtgaatatgccagttacgaacttctgaaaagagggttgtggagaggaggactataagaagtagtgttttctgaactattttgacctttggctattttacaggacttttgggttgctgattgcaacatgagagaaggacatcttgtctggtgggcatatacatgtacatagcctttttaagagaagcttttgggtttgatatggcagtagattgccctgctcacctccccaaccccaatatatttgaacatttctgaaattgggatgcggtttacaatcattccatgtgttttcttgttttttaacttgcaggaatgctgttaatgaactgagagtgccttaaaattaattaagtaattcagcttttaattttaatttgttcatgctcagcctactgactttgcaagaagtacagtattaagtgaaaagcattgaaggagaggaaaaaggctattttgtggaaaatgtctttataatcagctttattgtttagaagatctagaatctggttaaaaagcaaaatgagccatgctttttggcagcttattgtggtttcaaaccactgctaagcgcgttgtacctatgtatctgtggtagctattactgccccattttgaaagtgagggcattgaaactcaaagaggtgctgtaatttatctaccttaatagctgatggagaatgagattttagtctcaggcagtctcatttttcccaacccactctttgttttagttaattgatctttgacatttatttacttggtgtatactatctttatacctttgcattatggcatataccagtgatttctggaactaggtcattattagaatcaccttggaaactttggtaaactataaatttctggctcaacccttaaaatatactaattcactagctctgggatgtagcttgtattttaaacattaatgtaaaagctccaagtgattttgatgaagctagaattgagtatgacatctaaacacattataaaaaatgcttttctttccaccaacgataaaaatgggctgggcactgtggctcatgcttgtaatcccagcactttgggagaacaaggtaggaggatcgcttgagcccaggagctcgaaaccagccctagcagcatagtgagactttgtttctaaaaaaaaaaaaataagacaaattagccaggtgtggtggtgtacatttgtagtcccagcttgcttgggaggctaaggtgggaggatcccttgagcctaggagttcaaggctgcagtgagccgtgatttgtgccactgcactccagcctgggcgacagagtgagaccatgtctttaaaaatatatatagtagaatgcacatagcccccatatcatgaagaacgtaattgaatgatgtatgactcctgtatcagcttttgacatctagagttggcggtcaaggtgtgttgagaaagcagatgggcataaaaacctaaagctactgggtacctttgcctgaaatatataacggtgatttcttttattattattattattattacactttaagttttagggtacatgtgcacaacatgcaggttagttacatatgtatacatgtgccatgttggtgtgctgcacccattaactcatcatttaacattaggtatatctcctaatgctatccctcccccctccccccaccccacaacaagcccctgtgtgtggtgtgtgatgttccctttcctgtgtcaatgtgttctcatagttcaattcccacctatgagtgagaacatgcggtgtttggttttttgtccttgccatagtttgctgagaatgatgtttccaccttcatccatgtccctacaaaggacatgaactcatcatttttatggctgcatagtattccatggtgtatatgtgccacattttcttaatccagtctatcattgatggacatttgggttggttccaagtctttgctagtgtgagtagtgccgcaataaacatacgtgtgcatgtgtctttatagcagcatgatttataatcctttgggtatatacccagtaatgggatggctgggtcaaatggtatttctagttctggatccctgaggaaccgccacactgacttccacaatggttgaagtagtttacattcctaccaacagtgtaaaagtgttcctatttctccacatcctctccagcacctgttgtttcctgactttttaatgatcaccattctaactggtgtgagatggtatctcattgtggttttgatttgcatttctctgatggccagtgatgatgagcgttttttcacgtgtcttttggctgcataaatgtcttcttttgagaagtgtctgttcatatccttcgcccagtttttgatgggattctttgttttttttcttgtaaatttgtttgagttcattgtagattctggatattagccctttgtcagatgagtagattgcaaaaattttctcccattctgtaggttgcctgttcactctgatggtagattcttttgctgtgcagaagctctttagtttaattggatcccatttgtcaattttggcttttgttgccattgcttttggtgctttagacatgaagtccttgcccatgcctatgtcctgaatggtattgcctaggttttcttctagggtttttatggttttaggtctaacatttaagtctttaatccatcttgaattcatttttgtataaggtgtaaggaagggatccagtttcagctttctacacatggctagccggttttcccagcaccatttattaaatagggaatcctttccccatttcttgtttttgtcaggtttgtcaaagatcaggtggttgtagatatgtgacattatttctgagggctctgttctgttccattggtctatatctctgttttggtaccagtaccatgctgttttggttactgtagccttgtagtattgtttgaagtcaggtagtgtgatgcctccagctttgttcttttggcttaggattgacttggcaatacgggctctgttttggttccatatgaactttaaagtagttttttccaattctgtgaagaaagtccttagtatcttgatggggatggcattgaatctataaattaccttgggcagtatggccattttcatgatattgattcttcctacccatgagcatggaatgttcttccatttgtttgtatcctcttttatttcattgagcagtggtttgtagttctccttgaagaggtccttcacctctcttgtaaattggattcctaggtattttattctctttgaatgtaagggtgctttcatgcctcctgatccatatagtcttgatgtattaaaagtcttcattaagaataacttcagtgtaaactgtcatggatggatttgggtaagatgtcaacacacacatgatcttccactcttcagtgctgatatcagtaaaaaagaagcctctctaatctgcctccaaatagctgcagcttctttgatctagtctaatcagaggaacaagcccattaggggttaaaagattctctgctgctgctgctgccattaacttaattgctatgatacagtaaactatggggaagtcgagttaaatgctgaagtctttagggcaagagactaaataggttagttccataattaatgttgtatttaagaaggtacatagtgttccccaaagtgtgaccttgcagaagtgacaattatgtctgaagtcagcatgaaagtgaagtaacaattcaattctggtttggggaagtgtgtgggagtgaatgtggcagagtaggtgtgaaataaatgttctttagcatcagtgaagatttgtcggtaaccatcatttcagatatctgggagttgtgcaacccttctgttctttctgagtcatatatgttttttaaaaagttatactttaaaaatatttgtgaatatttaaaggcaacactgtatcttgtgtgtacaaacccatctgtgggctgacattattcaggggcatgtgatcagatgtggattaattgcatgtggtggagctttttatgccaactctttcagatattctagctcactggcagtgtcttcatgaacgtggattggccatcttttggattaatgggctagttaaagaaatcgaatcattatgagtccaaccacttgctagactcagtttatctcattgctaaaggtattagagctgcatttggtgaacatatttttctaataataggctttgacttcttaaaattatgtatttttttcctcttgatgaatttctctgaaagcagcctagtcctaaaactcacttctccccactgaccaatgtttattcaaataattttcctccatttgggcatgcagctactaccacaaatcaagcagggaagtcattctcaggatccttaattgcagaagctactcatttgttttagttattttcccatgtaggttgcataaccttgaggaaagggcatctagtatattatattgttcccataatagttaaatgactctttttaggaatcctgataatatccataataattattattcatactaaagcaaataaacaagcaacccactatgtgcctatctctgtgctcaacaaaacattatcacattttgatcctcacactaaactggttttgttctgtaattggttcatttggttggttttgaagacgtgcatgtaggcaagttgctttcatcttgttttatgatgaaggctcatcagtcaccttgtaaatggccgtaagattgctgagctgaagctcaatgatggagggaaaagacctcaaagtctaataatggatgagggcccttgttatctaagacattgactagaaattgagttcagtctttggtcaagaagagtcttgtctgatcataatgaaaacccaacccgattggggttgatatctgaattctactttaacatctgactgtagtggctggataatttgccttcctttcccttctttcatccattcactcccctcaccctacctcacccaccccatcttaatttgtattttgaatttgagtattgttttttaaaaataaggaaatttaaaatatatatattctcaaggtactcatactataatatagtcactaaagacattgagttcaaagttgggttcatatcagagctctgctgtttgatagtaaacttgggtttattatggtaatattaaacttgggtaatacccaagtttgttatggtaaaacttgcgtaagtgacttaaaaatctctgtgcctcagtttccttatctttacaaccctggataagtagtgtctcctgggaaggattgtgggaaatgaggttatgtgtgtaacaacttttgcacagtgactagtgcccagaaagggctccagatgtgcacaagaaatggtggcccttttattaagaagatatatttaggactttaaaagttaggttaaggctgagcgtggtggctcacacctataatcccagcactttgagaggctaaggcaagtggatcacgaggtcaggagattgagaccatcctggctaacacggtgaaaccccatctctactaaaaataccaaaaattagccgggtgtggtggcaggtgcctgtagtcccagctactcgagaggctgaggcaggagaattgcttgaacccaggaggtggaggttgcagtgagccgagatcatgcgagtgcactccagcctgggtgacagagtgaggctctgtctcaagaaaaaaaaaaaaaaagtttggttaaaaaataatgacttttggtgctgtgggatttgtgagctcaaggacttgtgctgcaagaacaacaaatagcagcctgcttatttaatagaaagtgccctcagtgagggtctgatctgcttttggcttgaggaatgcttcagaattttaattatttggaggagcttccttgaagttgctttatggttgctttctcttcacatcaaactgaagacataactgtaacaaatgagtattcctacaccaagatgtgacacagcaaatgaatttatggatgatgacattaatgatcatcatcagcatggctagggttctggtttgattagtagctcagactgctttcttaagatgaaatagtcatttaaatgaacatggcatcttctcttgaacaatgcttaggttatttttttttctcatagagattgaagacccattactcagcattatctccctctctcccctgaaacttttgtctgttcggaatgagctactccaggaagatttattgcttttcctcagtgttcttattagcatgctttatatagcttattgtgacacttatgataatacaaaaagtaataaaaatacaattattatcattcggtagctgctgatattcactgggcatatactatgtgccagatttgcatcgtcatctcatttgaacctcacaacttgtgagggagagatcttcatggcccccattttccaggtggtgaagagattaacttagagctgaaatacttacatagagtcagggctaggatttaaaacaggactgatggtgaaacctgaaggcatagacatgacccatagctgcctttatgttttacaacttcctgttgattttcattttcctcgtttgtcagtcatctcccttgacttcccacatctatctatgttgcatcctagcctggtgcctggcctggcggaggcattggagcattggaaagaatgaatgaatgagtttagccctctggagagtgtatgctgaaaaactgttacctcgcctttaagagcttaaaagtgaagagaatgaattttgatagaaccattttttaaagtaaggaccatccttctgtgtccccagaaaattaaatagagtcagaaaatggcaaagccaagttagaagcattcaggtgtggaagttgtatagggcacttgagttaaaaaaaaaaaaaatctgctcaggcataaaataattaaactgttcatgacagcgtataattgcatcattatattcccaactctgttactgtaatttggctcataaaagagcaaagtgtcaaaatctttctaatggtatttaattttgttttagcatttcctaaaggaagtgttcattttgtactttgaacttgtaaacttttgacacatccttacattctttgctgttgcaaatcattcgtgtacactacagaaatgactaattttccatttttcataatttggagtcaggtctttatatgaactttagatatttcattgttgaagacacttacatttgcatactttcaatgtaccttgttttttaatctatcttatttggagttaatattgttagtaatataacctggaaaaataataactcaattgattcaagaccattttaattaaaaatatgtgctaactcttcagggaccagctagaggtttacacttctctgaagacaggggttattgagcaaattaataatgtaaacaagatttttggagagaatatttaatcagcttgagagaaggcacttttcaagcaagctgcagcactttagaattatccattgacattcaaagattgatgtgttaattactaatcattgttttgaattcattaaactggtcatttaaatatctttatttggtcacattctattggtctcatgtaaattccaatgtcttttgactataacggtgatgcatgttgaatcctttcttaataattactatgttaccacttactttccaataatttagtcatcttgggtacacagtaaagcctctctggtcctaacctttcacatctgtcaaatggggccactttaaaccacttcatagggttttcctgatactgaaatgagataaagcatatgaatcgcttggtgcagtgctcaggaagtaggttactaattattagtccaaattagtgtgattttattattgagtgtggctgctattgctgcatttttttaccttagagttgcactgtaaattgatttatgcagggcctgaaatgaagatatgtggttacagtatttctcctcccaagatttgggcatttatttatatgagaaatctcacagaagtatagaaataaagtgtggtatgtttatttgctcagagggaaagcaataaacttgtagaaaattacaagtcttgagacatcaattggagttaggcccactgaattgtggctcggatttgagattaagggagtctcaaatttggaagtgggtggcctcagggtcccatgtgggcctaaggattgtatctttaagtcatcttcatagttaggactttgttcctttgctaaagctgtgattttctttttttcccatattgctagaaaccttctggtccttatgcaatctcccagtgctacctatggggtcatgctcagtttggaatgcttctcatagttggagagtcaggtttacttgcttaatgttttttctaaaaaagttgaactagttttagttgtactaagttatctttgtgcaaaatgagattttccgtagatacttatattctttcttgggattgtggcactagtataatcaactgatatttaatatcctttatgaaattttgtttacctgagattttgcattcatacaacttctggaaaatagcaccaaaagtgtatgtactatatggtttcatttttttctagtatcagttttctggaattcttgtaacagttaaatatgtcaaagacaagatgtaccagtccattaaggagatgagtttattcgggttattgaagtggggggatgttcagaaatgaagaaggtctgaaagaagagggagaaaaggtgaagatttataacacagggaaccaggaaggctggaggtgggccttatgatatgcaacggcaagttggttttcgtggcttaggacgtttcccaaaaagcaaaagggtaaagatttctgaaccttggttattgacttcaggagcactgggcccctgataaccatttgataaaatggttaaaaaaaataaagtaaaaatattttttcaagtagtaagaaaaacatattgggcttttcattagttgttgttttaccgatgtttaattcaaactatgttaatgttgcgattgccttcttcgttggcccaagaactcctaaaaacaagttttcattatacaaattgaaaatacctattctaactctaaactattgaaagcaattaattaagaagttttatctgcttatatctctcacttaaatagcccatatgagaaaaatagtctactatttattctctatatggacctggctgttaaataattcgaagtcactagtacctaattcttaaattggtatataccttcactggctcgttacaagcaggttccttcttgaaaacatggtttttgttggtgtttttggtttatggctccttgcacacaacttttctatatcaaatgattttccattaataagtgaggcattgtctgctgttatttcatccccaaattccccacttaacccagtgctggcattactggaactctctggaacccacttctgtagctgacctgcagctcctcattttttaaaatctctcttcctgctctgcattatctttctctcattatgaaaatccagcatcccctctcaaactcacttcctctggagtggcttaatggactttttctgtttattcttttctgctttgtcacttgcatagttctatacagttctatacaggacctggataatatgcacagctcagctcttagagatatatatacatatttatatcttggggatatatacacatatatatatatttatgtaccataaaacatttcagtcaacagtgaaccacatatatgacagtggccccataagattataatggagttgaaaaattcctattgcccagtgttgacgtagacattgtaatgtcatagtgcaattattaatactttattttttaataaatttagtgtaaccttaagggtacagtgcttattaaagtctacagtagtttacaataatatcctagatcttcacattcactcaccactccctcactggctcacccagaacaatttctagtcccgtaagcttcattcatgttaagtgctctatataggtctaccattttcattttctaccttttatgcctttttttttttttttttttttttgacagagtctagctctgtcgccaggctggagtgcagtgccccgatctcggtttattgcaacctctgcctcccagtttcaagtgattctcctgcctcagcctcctgagtagctgggactacaggcgtgtgccaccagacctagctaattttcgtatttttagtagagatggggtttcaccatattggccaggatggtcttgatctcttgaccttgtgatgcacccacctcggcctcccaaagtgctgggattacaggcctgagtcaccacgccagctaccttttgtgccatatttttatagtatcttttttatgttttgatacacaaatacttgccagtgtgttacaattacctacagtattcagtacaataacatgctatacatgtttgtatctaggaggagcaataggctataccatatagcctgggtatgtagtaggctgcaccatctaggtttgtgtaagtacagtttgtgatgttggcacaataaaatagcctaacaatgcatttcccagaacatagctccattattaagtgccacattactgcatatgtgtgtgtgtgtgtgtgtgtatgcgcatatgatgtcatatttgaataacttctaagtgctttcacttacgctacctttataagaacatcatcatcatcttcagtttattgagaaggaagctgaggcttacagtgtgactttctcacagttgcatagcttttcggcacaaaaggctagaacaagatgttgcatacagaccggggcactggttctctttcctgtctgcttacttagtagttgttcactgaaatgcagatttgcagcttgaagtacctaggcaatcaaagcgagtttttccctctcaaagatacttggtctaaacagtaataggtagttaacagccgcattctgggaagtaaccttcagaggccagatctggaatttttccaaccctttctgtatcaagtgagtgatctttattcaagcttagaaacttgtggaaaagagcagaccagatgcttcattttccaaacctaccgaattacttggaggaaaagcactggttggaatgaaggcttcttagccccataggaatttatattgcctgtgtgtgatatccctataaaatgagcttcctggcaagacttagtaaacacatttcaactagctataaagatttcataaaccatgttcttagtgagatgtagtagggaagaatcatggctcccaggatgtcattaattttatattaagctcagaatttaagaatagctaggaaaggcacgtgtccataatccgtagttacattcttaaagtgcagggaaaatgatcaatgctgtccaggaggccagtaaagcaatgcggttaagagctttcaatgttgcatccagagagctagttcaggttgtctctctctgcttactaccttgactaaattacttacccactctctgcttcattttccttatccgtaagaatgaggattatgacggtatttaattcagagttactgtgaagatgagcagattttatgtaatatccttggcacagtgcctaccacatacagaaaatgctcttctttttattttttggacatcagttgataccacttgatactgcacacatagctaaaattattttttgtttgcttttagacctaagtttttttgtgtgattttttttgactccatcttaacacttgataattatgaaaaccaattaattggttaggatgtgtgccaaacttgataccattctacatctccatcatttgaatgcctgggcatttgatcttagtaatcccaccctgggataaaagcatgttaaggaagagactaaagccctctcaagagatccactgctatagtccgttataatccgagagcaattgaggtcagtatccaccatggacagtcccttccaaggcttctgctacgttcttgagctacctacataatagagggcccctgaattcattgatgagatgatctaacagggtaatattctgaaatagcattcaaaatcatttcatggtgagaatttgttgtttctcttttactttcttctgcaggtgaattttcaggaatattggaagtcccagttggaggtaacacatggtaatcgaataatttggtcatttcccccatctttactacatacgtcttcatctaggacactatattctacagaaaggcttaagttggatagtgtccccatttaaatctccatctctttgcttcaagggtgaattattactggcagctgcaggagtggtattctgtcagcaacattctccatcttgctccctgataaacttactagtgggtgtcttgtgattttttttattattgtattagatgaaactattcctctgcctagtgtccatctaccatcaaatatttatctagagcatctcaagtactccaaatgataacactgatttatggttatttgaagtttctttgaggcctgctgacagattacaaaaattgcttgatatatctgtcttaaaagagatcattgaactaagaatgagttgtcatgttgtttggaatagaatatgtgtattatcatatttgaagctaattcttaacaaaataattcctatgtaacatatggattaagtttaaatttgaatttaacctcatattcagaataaaaacattatttcttggggaagtaattatattattactctattaaattaacctgaggacttctgcttttggctaaattagagtggcttgtgacaaactgatgtttctttgaaaacaatagaaaagccacatgtaaacctaatttgaagataacaaagaactgccaagacaaccaagagacccagaaatcagggaactatagagtgctgagccgggagtccacaggctgcttttcccttcagggaatttgctgggttttggctcaaggagcagttgagaaaacaggcagctagaaaatcataccttgtgggcaacataatttttggtgatctcataaggctgaagagacaagcatagaagtttgggtctgccaaagcagccaggattcagaggaaccaagacctaagagagaagatgggtgccttgggtagatttatacctgaaggctttttattattattattattattattattattattattattattattttaatgagatagggtcttgctctgctgcccaggctggattgcagtagaatgatcatagctcactgcaacctcaaactcctgggctcaagcagtcctcccacctcagcctcctgaatagcttgtactataagtgtgcatgagcatacctggctaatattttaagtattttgtggagacagggtcttgctatgttgaccagactggtcttgaactcctggcttcaagccattttcctaccttggtgcaaagtgttgggatcacaggtgtgagccactgtgtgtgtttttgatagtctcctagggctgaggttaaaataagtagagttgcacatccacgaatgacaggtgtactagtgtaccccacaggccttaaaccacacctatggagtgtgtgtaaaccagaggtggaccacatctttcaaaacactaaccagctttgagtcaactcaattccaaattggatgaaagtaacgccccatttcagactggctgccagagagtaggatgaaccttctttggtgggagataccatcatgcagagtctctataattctgcattcacagcttctgtaattctacttaaaatcctcagacacatcaagaaagaggaccaagagaaacaaacaaaaaatggaaagaatctcaatgatgccccaattggcattatcagaattggatttttttctgaagctaattagttgcagttctcccagtaatgccaggactctcaagaactccattgtccctcctaccctcccttgcttcactcctggcttggtccattaattttgttactacttgtactgtaggcatttcagtttccaactgctgcttttcagtaagaagcaggtctattttttctaggatattaggtcttccaagaaacacaatatggatttgcacacaaaagataggaatatgttatcaacacaggcttttgaatgatttttatttaatcagtcttgaagagtggctattacagtttcacattttctctctgcataggaagatgagtagagggataacagggagtcttgctataaacagaaatggatgatttttttttttttgctttaaagtttgctagtttggtgaaatcacatctgtgtctttgtctttgaattctttcttacaaagaaagaaaatcgtgtgtctacagggggaaaaataagaaaagcaagttcagacaggcttaagtaaaattacattcagccctgtgagtggcttcctgggaatgttgaatgagcatttttgacatagactgttcacacctctctcaaatgataaacgatcaggaatgagataggccttcgtaaaccagagtcagctttctctcagttccaagagaagagccattactttgtttcttttttttttcttcttcttcttctttttataaaagtggatagcttgccatcacagcagtgtgctttctttgatgacctttggtaagaaacgtatcataattgcttcttaaagctacagaccactataatccaagaacaacattttagatacagtctgtgatacaagttaccctgagtgctttggaatcccagtcctctagagtgattctcaaaatgtggtcctcaggctagcatttggcatcatctgtgagtttatttgaaatgcaaattcatgagccccacccagacctagtgaatcagaatctctggagatagggcctgggaaactgtcttactctgttttccaagcaatacttacgtgcattagtatttgattaccatattttagagtacttatggtaatccacatggagttaccaggtagggctcaggtaactaagccacatctgtggtgaggccatagtgccccatcaagaaaacattgcactgttcctttcatcgcttttcaatctaacggaactagggtctttgggcagtttctcctcagccagaaaattgtgcctaaggaattagatggcaaaaacaaagtttcaagacaatggagtcagagtttttcttttctttctttttttttaaaatttttttttattatactttaagttctagggtacatgtgcacaatgtgcgggtttgttacatatgtatacatgtgccatgttggtgtgctgcacccattaactcgtcattcagcattaggtatatctcctaatgctatctctcccactccccccacccaacaacagaccccggtgtgtgatgttccctttcctgtgtccaagtgttctcattgttcaattcccagctatgagtgagaacatgcggtgtttggttttttgtccttgtgatagtttgctgagaatgatggtttctagtttcatccacatccctacaaaggacatgaactcatcatttttttatggctgcatagtattccatggtatatatatgccacattttcttaatccagtctatcattgatggacatttgggttggttccaagtctttgctattgtgagtagtgccgcaataaacatacgtgtgcacgtgtctttatagcagcatgatttataatcctttggatatatacccagtaatgggatggctgggtcaaatggtatttctagttctagatccctgaggaaccgccacactgacttccacagtggttgaagtagtttacattcccaccaacaatgtaaaagtgttcctatttctccacatcctctccagcacctgttgtttcctgactttttaatgatcaccattctaactggtgtgagatggtatctcactgtggttttgatttgcatttctctgatggcaagtgatgataagcatttttttcatgtgtcttttggctgcataaatgtcttcttttgagaagtgtctgttcatatccttcacccagtttttgatgggattctttgtttttttcttgtaaatttgtttgagttcattgtagattctggatattagccctttgtcagatgagtagattgcaaaaattttctcccattctgtaggttgcctgttcactctgatggtagtttcttttgctgtgcagaagctctttagtttaattggatcccatttgtcaattttggcttttgttgccattgcttttggtgttttagacatgaagtatgaggccggcatcatcctgataccaaagcctggcagagacacaacaaaaaaagagaattttagaccagtatccctgatgaacatcgatgcaaaaatcctcaataaaatactggcaaactgaatccagcagcacatcaaaaagcttatccaccatgatcaagtgggcttcatccctgggatgcaaggctggttcaacatatgcaaatcaataaatgtaatccatcatatgaagagaaccaaagacaaaaaccacataattatctcaatacatgcagaaaaggcctttgataaaattcaacagcccttcatgctaaaaactctcaataaattaggtattgatgggatgtatctcaaaataataagagctgtttatgacaaacccacagccaatatcatactgaatgggcaaaaactggaagcattccctttgaaaactggcacaagacagagatgtcctctctcaccactcctattcaacatagtgttggaagttctggccagggcaatcagcaggagaaagacgtaaagggtattcagttaggaaaagaggaagtcaaattgtcactgtttgcagatgacatgattgtatatctagaaaaccccatcgtctcagcccaaaatctccttaagctgataggcaacttcagcaaagtctcaggatacaaaatcaatgtacaaaaatcacaagcattcttatacaccagtaacagataaacagagagccaaatcatgagtgaactcccattcacaattgcttcaaagagaataaaatacctaggaatccaacttacaagggatgtgaaggacctcttcaaggagaactacacaccactgctcaatgaaataaaagaggatacaaacaaatggaagaacattccatgctcatgggtaggaagaatcaatatcatgaaaatggccatactgcccaaggtaatttacagattcaatgccatccccatcaagctaccaatgactttcttcacagaattggaaaaaattactttaaagttcttatgggaccaaaaaagagcccgcattgccaagtcaatcctgagccaaaagaacaaagctagaggcatcacactacctgacttcaaactatactacaaggctacagtaaccaaaacagcatggtactgttaccaaaacagagatatagaccaatgggacaggacagagccctcagaaataataccacacatctacaactatctgatcttagacaaacctgacataaacaagaaatggggaaaggattccctatttaacaaatggtgctgggaaaactggctagccatatgtagaaagctgaaactggatcccttccttacaccttatacaaaaattaattcaagatggattaaagacttaaatgttagatcttaaaccataaaaaccctagaagaaaacctaggcaataccattcaggacataggcatggggggagtttttcttttctatagaccatcttcccaccaccagaagttcttttgattctatgtaaaaagtctttgtcacttaggaggatgaatcaggaaccttaggtatgtggcaaaacaattaggcattataatgaaatcacatctcttttcaaaaaagagaatgacattcctttcagagtgaccagggctgggcatggtggcttatgcctgcaatcccagtgctttgggaggctgaggcaggaggatcgcttgagcccagaagttcaagaccatcacagggaacacagtgagatcccatttctacaataagttaaaaaaattagtcaggcatggtagcatgcacctgtagtcccaggtatatgaaagactaaggcaggaggattacttgagcccaggagtttgaggctgcagtgagccatggtcatgccactgtactccagcctgggtgacagagcgagtccttgtctcttaaaattaaaaaaaaaaaaacacaactaaaaaaagaatgagcgggaggaaaaatgacctgatatatatatatatatatatacacacacacacatatacatatatgtgtgtgtatatatatatttatatatatataaatatatatatataaatatatatataaatacaaatatatatatatatataaatacctacagatgcatcaaatatcaattcttcaagaatgtattggcctaagatttacaacaacttttataagacaatagcctaatttactaaccagtttgtatgtgactctttctaaaggtgtgtctctatcttgagttctctatgtgttaagtgattttattttcctttgcctattctctaaggtaaataaaaaagaaacagttgttcaaggagaagtttgagatgataaattgttttttaaagattttgttgttttcttcagcccactatttaaatgattcagtgagctacttcattgttaagtaagtggagacacctctttttcccgagaacataacttccaagaataatatatttattgctagacatttttagaaacttgtacagttatgtgagtaaactccctgcattgacatggtcaaacttactggtagtacagccaagaaggaatctgaagagggcaaaggtatagctcatcagtgattcatcgaatattggtgaatcattcagaattaggtcccttctgtgtaaaatggccttttttttaaattcttttctgtctcctgtatcaggtaaagatagtgatatcacctggttctaccttatgggactttgcaagaggtacagcagcaagttctaagaacaaaagcaaaaacaaaaggggtgaacatgctgatttccaagaaaggatgactctttttaacttgttattatatcacacaagttcataatacatttctcttgctgggttgtaatttggtagagtatcagaatcgtatgccaacataaaacccaaagcatcttaaattctaagtatcacttattgccctatgttatttgcactttggttgagttcctccaagctgagcaactggagagaggttccaggagagtgtgtgaaagagtctactttattaaaaatatactgaaatgacagattccagagatttattgccccactgaatattgcagaaagacaggcaagaaaaaaactttggatttatataaattttatctgtttggttacctttggggagtctttgggttatatagtttggattggaaatttgacataaatgagtttacatgacctgtgactttgggcaagtttttaacgctgaggttcctcatggtaagatatcaatagtactttataggattgctgagcgaattaaatgatagtgcaggtaaagttacaggcgtaggacctggtacatattatacctcaattggtggcctctcttattatttagaatgttattatttggtatgagccctatttgacatgcctacaattcctttcaaaattagaatggcactgtgtaaatgatttcatttatataccatcttccagatagagacgggtaacagggcactcagaatgacatgtcatggaaatgtaacaagcccaatttccctgattgggagaaaagtctagtcttgggaactgatgactgggaagataccagttacttgtttgaaatttggatagggaagagaagtggaccaagggcagcaagttgttcctgaaatcattccaagaagcctaggaaccattcagtgatttaagaagtctttgacttgctaatggacaatgcgcctacctctgttgtgcatataaaatgagactctgggggctaggttggcttagaactggcaagactgtgactgaggatgaccagctgtggggctgtcgatgtgaagtaggggtgagagtacctcagtaaatggtgagaaagagtaaaggattggaaacatgatggaacgcagcatgaacataaacacagcagtggttcatttagactggcatgtgcatctcttgcccacagcacaaagaaagaaggggtgtacttttgaacaagcccaaagacacttgcatcttttgtttcttgagcagcaagtctggaatattccttccgttctaaaatgatatatgcctgcacttctgctctttgaggagcctgggagtttagaaaagagtgattcttgacactcaagggttgggagacacatgatgcccagagagaagtgagtgttacttgctcttttcccaggctgctgttctggtatttaggagtatcagaagggagatgtgcctggaggaatcactgactgagaccaggaatcactgactgatgactcaggatgtcatccatctgatcacctgtaatccttcgaggccgtacccaaaactaaaagcagggttctgaagtgggtaaccggggtgggtagagcttgtgttgctagagaatcttgcctctagctacccaaggctttgcacagagcacagtagaagccctttattcaaatcagttaggacttctagtttgtcagttgattgaaactcttggctagagcaaaaaatgttgctttaccaagaaataaaaatgctatttaaatgtttttaggacattataatgtgcatctgtttggtaattcttggttctagacctccttaaatatgaattgactggttggagtctcacctctactttctcaaataaatgttacccactgtgcaccagtgatgattccttcaaagtggagtaaaaacttggatgcctgcaaagcagtctaaggcacagttcttctgggcttttgtaatcatctttctcaccttgtaaagatttctccatctaatataaagccaatcactctcaccaattcgatttatctcatctttcgaaaaaagtaatggaagcaatggctctattttcttccgcatatttcatcagtctcttatattcttaaatcatgtaaatacactaaaagtatgatgggtttgggaattgatattttcctggtaaacatacagctgaggtgatggaactagattgtacagtgttctagaaggtagtctaggcaattttggtgttctgggtaccacggacatcattatgttctcaaaggaattgcagaggtttgatttaacccaacaatgtggttagttggtgatcagcatgaatgttattttcccattgtcttagtaaaaaggggattgattattaaacaggaatagttctctttaaatttgaactgtcaagttgttatttaagttaacagtgtgtaatttttgaaggctgttgtgagacctcagttcttcttagtttaaaagaaattaaacaagacacagcaaaggatatgcagcacagagtcatttactgcaaaagaaaagcatattttgaaagttaagtgcggaatagacagtacaccctgagagacagagaattcagggtgggctgcttgtaaggatgagacagcaaagactggcaatagggagtttttgggagttttacatgattattcataaggaggtggaaagcagtgttactagtaagcatgttctgggtggtcgtctggacgcacatgtgcagtagctgtacatgcttgtccatgtgccacatgtctcattagcatcttaaatctccacccatcggtgtgtttttcactattatcatcagcacagggtcagtctgaggacaggtgaaatcacatgtgcatgctccctccaggggaagttccctactggagatagctttgcttgagtgagctggactacggtgcaaatgctggggcttattgttttgactgtacggttgccacagttgccatatcccaaggacatgattacttccttgactacttatcctgcctcatgtaattatatagaatctttttatataatatgactatatgaaagtttacatatgtttatacaatcatactgtatcttaattttaaaaaatgtaaattaccatgatacattattctaggtagctgttgttgaagtgtgtagatatctattaattcaagtgactagtcatgattttggtgcatggggtagagaatatcttaaagtatgtcagccaaacacctattaactccatatttttagaatataggtctggatttcccctgaatttagatgttgattgttttgcatgagaaggcctttatttagtaacataaatatgaatttatatcttagaactacataccctcatatgacatctgattatttaattgccatgtgaccacagataaataacacaacctgagtatcgtttacctaatctatataatgattattaaaaagaacacccagcttatagggttgatcattgctggaatgagatgatgcatgtaatctctgagcacagtgcataggatgtagtaaactcttaatacacagtagtgatgatgatgtgtcatggcgggcatagagcaggattcagcaagttttggctaaatgaatgataaatggagctttacttgcttttctctaagttaagtgcctgacaggaagccctcctaagaacatatagagagaattttataacttaatggagtatttatttatggttttaatgtattgtataatcactcccttttattgtaaatatgccttccttctctctgcctcggtgacatcactgtccacattaagaaaaatccttgcctggctccagcagtcttgcccacatgtctacgatttatttatgccaactattgatcaagaacatcagtgatgggtttttaaggcatacgattttctcagtttgtttgccactttgcagaatttccagaaagttgtactaaactttaggttttagttggcctctcctgtgaacagggggaagagattgaaaacataatcaaatcaaataggaaagtacaaaatacgaggtgcttgttaggtgctgttctttactttatttatacttggattttatcttttcctgtaggctgtgtagtttaattcacagcaaaacattttgtgaagtagatgggtagttaaaagaacctcagaccaataatgtttttcctagacattaggtaaacattttctaatgatgattcattttaaaaatccatactttgtaaaaaatgaataaaatttgacctgagttaatattaatgccttagaaataaaaagaaacctcttttggctcagatctgtgaagatgagcagcgtatgttgcttagaatatagactccatgaaggcagcgttttttgtctgtatggccacagacattacattcatgatttaataaaaaatgattttttaaaccaacaacttgatttatgaagaatggtgtacacatctgctgaaatatcaaacatttcctttacattggtgaagaaactaaaaggctaatatgtctaggacatataaaagcctagaccttctgttggtctgttttattcactgctgtgtcctcagcacctaggacagtggctggcatgatgggcacactgcatatacttgtgaaaaattgttgaataaaagttactcaatctgaatgcctatcattgataaactggataaagaaaatgtggtactggctgggtgtggtggctcacacctgtaattctagtgctttgggaggccgaggtgggtggatcacttgaggtcaggagtctgagaccatcctggccaacatggtgaaatctcccatctctactaaaattacaaaaattagctggatgtggtggcgcatacctgtaattccagctacttgggaagctgaggcagaagaattgcttgagcccaggaggcagaggttgcagtgagctgagccaagatcgtgctactgcattccagtctggatgacagagcgaaactccatctcaaaaagaaaagaaaaaagaaaaaatgtggtacatatacacatggaatactatgcagccataaaagagaacaagatcatgtcctttgcagggataaggatggagctggaggccattatccttagcaaacgaatgtaggaacagaaaaccaaatactatacgttttcacctgtaagtgggagctaaatgatgagaacacatggacacatagaggggaacaacacacactggggcctgttgtcagaacacggagtgtgagaggagggagacgatcaggaaaagtaactaatgagtactaggcttaatacctgggtgatgaaataatctgtacaacaaacccccatgacacatgtttacctgtgtaagaaacctgcacatgtaccccttaacttacaatataaaagttattaaagtcttagatttaagtattaaaaaacaaagtaactcaatctggcatttatcttcaccctgaaaagaaaccaaaagaaggcctaagcttttatgtgccctggaggtattagccttttagcttcctcgccaatgtaaccaaagtttactttgatatttcagcagacgtgtgcaccattcttcataaatcaagttgttggtaaaaaaaaaatcatttttattacgttataaagtatataattccccaatagtacatcaactcctcaaccacatcaggagagttgttaaaaacagccttgccatcatatctgaatttttcatttacaaatcaagtccaataacactaagtcatttaaaagttagactccctagtaatgttggtggctctatttgcatactttttctattacaaatgtctgtaaaggactggaagtttatggtttgcagttacttcccacagggctttggctgaaggctagtatgaactggatagcctacatttcagcacaaatcaaagagaaaaggctgtgcatgctaatggcctgctgctggcccagcacacagtcatctttgctgtgaagtggctgataaggggtggtctgataaggatactttgtattttaactttagatttatttgtttggagacaatgtaaaataaaccaaaaaagaagatctttgatacatgccacagtggagaaaaaacactgttacaaatgataactgttttctttggtttaactatgaatgttgtagttagtaagatgttatttccaaaatgacaacccaaagagtagaaactatgatttggtgggtgggcagcaatgggtaaagaatgaaagagatattttaatttaatgggaccaaggaatatactgtaaaatgtttcaaaataattaggcaaaatgcaggaggaaattgaagagaaattattctgatatctctttggtataaagcaggcatttatctacggtaacactagtaccagtctgtcaagacatttaagaaaatggtttgaaaagacagtttgaatttgttattaaaacctgaaatagagacaaggtaatgtacatcaggtagcattttcagtggcaaggaaatgtgacattactccagaggtcctggtgggggactaggatagtgtgatcattctcaccctgctgtgtgagattgatgtaaacctcaaatgtatcccctatgcaaccctgccatccctcatctcacaggatgaaggaggaaagcagggaagaaaatgtgtcagaaagagaaagacagagttgtactttttattcctgctgagtatttaacttgcctattctttaaaagtgactattcacatatggatttactttgagattttgctgtcaatagtgatttggaagagaaaatatttattttctaaatgctgagaggtagatagtgggatgtaactgcaaaagattcccaaagggaaatgcaaattttgagagaaacggtacagacaaggtatacagtaaccacccactgtcattaaagtaattggttgaatatggtataataaaagggtccaattttaatgtattctgtggtacataaaaataagctcaaagtgaaacaaagatttagaagtaaaacctgaatctataacgtctgtagaaggaaatggggaaatctccttaacatttgtctaggcaataatttcttggataggacaccgaaatcacaggcaccaaaaatagacaattgaaactacctcacactgaaatgcttctgcacagcaaaggaaacagtcaacagagtggaaaagccacctatggaataggagaaaaaatgaaccatacatctgatgcatctaatatgcaaaatatgtaaggaattcctataactcaatagccaaaaaaatccactcaacttggttacaaaatgagcaaaaggacttaaatagaaatttctccaaagaaacatgctaatagccaacaggtatatgaaatgatgttcaccattactaatcatcagggaactgtgaatcagaaccgcagtgagaggacacctcacacctgttaggatgggctgttgtcacaaaagcaaacccaaaacccaagtgctggtaagtgtatgaagaaattggaatccttctaaacagttggtgggaaaataaaacgatgcaatgattatagaaaactgtatggagatttctaaaattttgaaaatagatttaccccatgatctagcaataccacttctgagtattttaaagaattaaaatcagtatctcaaaggatattagcactctcatgttcattgcagcattattcataatagttaaaatacataaacaacctaaatgtccttccacagatggatatataaagaaaatgtgatatacatgtatagtacaccccccacatatatatatatgaacattattcaccttgtcataggagataatgtagatgaacctgaaggtcatcatgtcagatgatattaaccagtcacagaagtgcatgattccacttatatgagaaatctaaaacagtcaaattcaaaaaagtagaatggtcattaccaggggatagtgatgggggcagggatgaatagagagtttctgtctgacagatataaagtttgttatggaagatgaactattagttctagagatgatctgtgtaatgtgtgtacagttaacaatattatctagtgcacttaaaattttcttaagagtatgtatcttaagtgttatcacagtaaaaaaaaaaaaagacaattcttctagcaaatgttttgatgtgttttaatcttataagtaaaaaacaaacacaaaaatgtgttttcaaaaaccataatcaaatataaacaagtataggtgatttgatgttagtaggtgacaacatccaagaaaagcacattggtaggttggcaacatgttaattttactcctgtcaccaatgcttcccccagtagatccatgtgagctatttgaggcaggagctatttttcataaacagtttttaaggatcctatgacccttctcaattgtttagctgtgaaaattagaattatgtttatttgtaaattgcctgcatgctagtagtctcttgcttatgaagtactgataagccatcctcagaagcttttaaaagaacctctgtgttaagataaaaatgctatatagtgatatatttaccacggtttcactatacactcagtttttatcactatcagtatattatagatgacgcatatggatggaagcatgttccctcagagctctttccttttcattaataattgtagtagctatctagattaggtccaacactcatttattggatgttgaatgttgagtgcctacaatgtgtcaaaaactatagtcagtcctgagaattaaaaataaaggcccagactaggcatggtggctcatgcctctaatcccagtactttgggaggccaaggcaggtgcatcgcttgagctcaggagttcaagaccagcctgggcaacatgatgaaaccttatctctacaaaaaatacaaaaattagctgggcatggtggcatgtacctgtagtcccagctactcaggaggctgaggtgggaggattacttgagtctgggaggcggaggttgcagtgagccaagattgcgctactgcactctagcctgggtgacagagtaagaccctgtctcagaacaaaaacccaagcaaacaaaaataaaagccctactgccaaggagctgtaggtcagtggggtgagcagaggaatagtgtatttgcatgtttcctctaataaaactatgcaggagaccacggatacacacatggggcaacagttaattttgtctcagggtggccataaaaagctactaagagaagactctgagctggacatgagagagtctgtaagtgctcaccagaagggggtgtttgagaggcgttttgagctgagggaagtttgtaagccaagttgcaggatgtcagtgaggtgcttaggaaatgcagactcccgactttggtaagatggctttgtcatttactgcatgtgtagccgaggacaagatagaacttgagccttcatccttcaccagtaaaatactaaatgatttgaaataattaaaatatatacttaaataatattgaaagcataaacattagttccctttcaagtatgtgtgggaggtggggagatagttttgagggagctgtcagcaagagataggtcagtgaaacagccagcgacagctacactaagcatcctgaattgattctacggataagagtgagccagcagtggttctgagttgggagagcctctgctttcctataaaattgttaattgttatccagtttgtaaagaaaacttaaatactaaatcattaggccaacatcataaaaagaaatgatggagcaagaatgttgcatgtaagggatagaatgaagttaatggtcattcttttttttttttcttttgagatggaatcttgctttgtcatccaggctagagtgcagtggtgcgatctcagctcactgcagcctctgcctccagagttcaagctattcttctgtctcagctcccaagtagtttagaccataggtgcgcaccacaatggctggctaatttttgtatttttagtagagacagggtttcaccatgttgtccaggctggtcttgaactgttgacctcaagtaatctgcccactttggcctcccaaagtgctggggttgcaggtgtgagccaccgcacctggcccaaaaccaggactgagaaaaaggagcaatcttgctttagagtagttgagaattatcactgccctgaatctcaccacccttgcaactattggcttaatctcaaggaatgaaaactgatggaagcaatagaaagagatctttaattagtagagtacatcgaaccttacatagatgtaatctcccaaagttcagtaaaagcttagagtcatcaagaagttggtgactgttatctaaacttgatggagataagagcagaaaacagacataaaaaaataccagatgagagttataaaaatacagtgaagagtgaagtatcctgccttagagagagaatgatataagagaataaaatgcagtatttttagctaatgtgatttgtaaaagtaacagtgcaagaaagcagtttatggcagaaaaaaaaatattgcccttagacccacaatgaaccagaacaaaatgggataggctgtgtaagaatcaagttggctcagaagtaagacacctcataaaggtactatatttagaattttgaggtggaagtcagaagtgggtttctgtattatacttctgtggttcttcctctctgtggaagaaaaaaggtaatgtttgttcagaaaatggctactgtgttttagacacagtgttaagtgctagtaagaggtacttagtgaaaaaatcacttttagacacttgagtaaactggttactcgctctattctccagtggaatgcaacagtctcattgtatcctcacagctccacagagcagctgagggcatctttttaatactgcaaatctgcaggtcagaagacggctctgccccatatgtctcattttggtgccatgatcatggctttgtgtttgcctggaaagtgtatgttcttctccagtcagtcagtatctcccagaggtacaagcagaaacttcttaaggcacgggcttaagctggtacatggtcttctgttgccttttcatgcgagtcacatgaccaagtccaacagtgaaggcagggaggtatgcttcttccataggtgtttaggaaagaatggaaatgcttgctcaccaatgacttcttccacctcctcacttagcctcttagtacctatgcttccacacctatacagtgagtatattgatattttagaaagttgttgtggggataaagtcaactattatacataaaattacatgtagggttctcaacaactagtaaccttttattctctcttctttattgttccatcctcatcccaaccacattgggtttatgggttccctccatcaccctgcagagccttattagagcatcatctatcactgtgtgatagatacccttaaacagggccgggccatgttaaacctgctgcctggggaggctcttgccagggtttgcttgttctctagctggtaaggccatctagaacttcttttgttttcccatccctcatgggtctgaagttgttgtgcctgttcaggaaattcctcctgacttccttccttctttttgcttgggtttctttgaattttgtctccatatttagctcttgctcctttctgggacagtcttccaatagaattttttaatgtcttactcaaatcttgtccaaagcgtaaccatttctaggacttttttttatttcattactattgataagtggaagaaatcagtgaaatcttttaaaatcacttaaagaaggtatttataagagttttaactgatgcctcctggtttatttttcataaactagaccaaaatttttatgaatgtcgtaccctcagtgtttggcaggaaataaagttgtgtcattgttttgtactcaaagtaatagcctgcgaagtttcctaagagataactaggtctcagtgctgtcctctctttggtaaggtggtttgaagttttgcattatatagagagattttcagctgcactaggtaaaagctagattttcaactcttaacaccttaaggccaagcagagtaactgaaagttgtcaagcatatccaattatttttattctttccctttgttcaaaagaatcccattcatattgggtattttctttgggttgcatgtgatgaggtgaacaacactagtatctgcctctctcccgtaagaaaattctaactgtcctagaagaagatcagatctcagtgatgacatttatgtcccaagggactttctcattaagagtaaccttagcctgctggggcatcattgcttcactttgagtttagctaagatgcagcctaccaattgcatttacccctgtcacttgcttctttgtcctttttcctttatgctgtcaagtttccattttaacaactcttcagtttctttatcaatgtttattgctgaatgtggtagtcagtgttcacagaaagaaggataaacaagcaatattgctaatgttttccaagagttaacaatctggatgcagactcaaaacgtgctctgatgaagctaccaagtaggacattgattcagtttaccctgatggttcagtaaagggatataggaagaagaattgaaggccttgttaagctttcaagtccgattgacagggaaatgggtcctattgccacgattccaggtaataattcgaacagttatcattgattggattcctttacatgtaatacaatagccctgtgagatagatgttaccttctccaataattgaatgaggaaactgagacccaaagatattaaaaatatgattaggtcattgcaattaagtggcagagctgagattggaaacttacatgtattggactttgagagccctcttggggttgtgccaatttcattacctttggaagacctacttgtaaatacttagagattttgaactaaggttttaataaattaggaagaaaaaggccaacctagtacctattgggaatagaaaagaagccttgaatataaacttgttaaaacaggagttggccaattattggttctaatggaaacaggagaggaagaatgtcctagtgatgtttacaaactaaatgattgggaggatggagaagacattaacaggactggcccagctaggagggagagatattgagcaagaggtagatggggcaataataaggtagatttgggagatatcaaatgaggagtttggtagtgcccacatggaattgaccagcaggcagtaggaaaaataggacatgacttaagagagaagagcagtctaaaaatctagcaataatcacatatagatggttattaaagtaactcaattaggcataatcactttggagagtgttgagaaagaagaaattccaggaaaaattaacccacatttaggtgttggatcaagaaaaaacagccagaggaaaagacagagggaaggcagagggtacgggagattgctattgctgtgtaatacattaccacaaatgtagtggcttaaagccacagaaatttattgtctcaccattttcatgggctggaatatttaggctggaacatggcatattttagctggggtcctcagctaaaggtcctggaaggctgaaatcaaggtgtcagttgactgtgctcttatctggaggcttgcttgactagggaaatacccagttccgagctgtctcctgttggcagaatctgtttccttgtgattgtaggactggggcacccattatctttcggctactgcgcagcgttcattctcagctcctagaagctgctctcaggtctccgccacatggctatctcttgaagccctctcacaacttgagagctttctccttcatggccagcagtagaatttcttttaggctttgaattatttcttcctttaggaagaaaaaaaagcctcagccccttaaaatggctcacctgaataggtcaggcccacccaagataatttcccttttgattaactcaaagtcaattgattttggcatcctaattacatccgagaaatccccttacctttgttgtataacataacctagtcacagaagtgtactccgtcttacccaagtgttgcccatacttaagagggaggaattatatgggttacatataccagaggcaagaatcttgagggacatctcagaagtctgctgaccaaaagtcgtagagagcgctgtctagtaaagcaatttaattgaacatgctactgcatgccaagagatgtaggtatgaggaagagcagtccttacttctcgaagccaaaattctgatggcaatgacagagcctaggaagtagaaaattgtgatgatcaaacggtgaataatttgtaatgttctagagagggtgttgactaaggagaaatgggagttggatttagattttagggtttttgtagtgctttctgtagaatggtaggggttggagtcaggttttgagctataagggaatgaatgaatgtgagcagtgataaatagatgcatatgtagaagagtctaacattttttacagggagtttacaaagtagagactatttatcatttttaatctttagtatggtctagacctaagaatgtttgtagcagtagggagggaattcgtgggaaggggaaaatgaacatgatatcatccgtcactgcttaaaccgtcctaggactttgggagactttagagcaacggagatctttctcttctttcaattgtatttcgcccatttaatacttccatggcaattattgtatgccaggccttatttgcaagcacttggcaagtattcactcacttaatttttacaatcatcatgtgagtcaggttctattttattcctgctgaaagactcataactagtccaaggtcaatgagcttataagtggtagagttgagattcaaatccaggaagtctggctctggagcccaggctcttgaccattgcattaatacaaatgctcttttctacatggttctgttggtcatgacttgtgtgaggccttgtgacaccccttgtattgttattgctgtgcacataaattctctgcatattacatatcaattccccagccaggtggtaagctgctcagagacaaggacatatttccataacacttttccttcttcatggcatcttatatggggtggctatcaataaatatatattgatttgatttaagctgggatcctatcatttacttcctcatttcctttaatctctattgattataaaattaattgggtggtgtgtaattctgatttaactacttagcctgtaactataatttttatgacttttaacatcatgataaatctgtgacctttttgaggagtttcttgctttataaaatttttcacttttaaaaagtggatgaatacatcatagttctgagaactattttctataaggaaaaaagggatgcttccctgttggccctttgggttgtgttaaaatcttcattttctttttttaactgctaggttcaggggtacatgtgcaggttggctatatagttaaattgtgtatcataagggtttagtgtacagattacttcaccatccaggtaatgatttcacatttgaatgatggaggcccagggtgggagagaatcatggagttgagtagaatttactgaacattggagagaaagatcatctttggcagtggtcttggctttatctccttctggtttttaatttttgtctttgtaaagaattaaacaaaatcattgcttctctattagtgccaaccacagttcataattgagccaagtggccatttccatctgaatagtcagccctgtattcacttccactgcaggatgacatttcccatcccctcctgtaggagggtgcttcagatagttgcagtgggttcctgatagggatgtgttgcaaccatcctcccttgatccatgtgtttctaccacctaggaaggcacgttcagctaatgtggtttttacttgcctacctgtgtctcagaaaggctcccaatttgccccacgcttattgcaaaagtatgtgccataatgttaaagggaagataggattaaaatccctttttgatttattaatccatgcagaaggtgactactgataaaaacttcagagcctgtggatcagttatttttgtttgatcatctatatgcactacagataaagaaaacaaacctcattgttagaaatgacaccccacaatgggggttggattttatagcatttttttttcttttcacaatgctacattaaaagttgctcttctatgttcttcttcaaagcacttgtacctgaggtaagcatcaagatatttatcccctgctgactcttcagctacatttgatcaacaacaaagagaagacagctaattttatctttcttccatgtattttgggcatgtttgtgtgtgtgtgggtgtgaaatgcacaatgcatgtgtgagtgagtgtgtggagtgcatcagagcacaagagattgtgactgattggaaaccaaagctttaggatgtagaagtttaaagatgaccagacaggacagagtggagatgcatttctgactttagctttgtaagctcttcaagaaatacattttgtttacttttgtttctctttgaaaagcagtctttatctccctgtatctaagagctttgagatgtatgtgagttcattttctaataatctcaaaacatgttctccgatattagccagtattttccccagcctgctctctgtattgagacgcagggtagtctagtggctaagagcactgaccttctgttcaaaccttggcttacagctgtgtaactttgggccaagtgatttaacctctctgaacttcagcgttctcatcagtaaaatcagtgttctcatcagtaaaataaaagtagtaatcaccattgtagggatattatagggttaaaggagttaatgttttcaaagtgcttggaataaagacctgctacacaaatggttccatgtaagtgtttacctttatcactatagttactgtagtacaattataatctaggataaaagcagaaagaagtacaacataaattgttatactatcagtgttttagtagctgtattacttttgggaaagaatgaagagaaaaggtgggggaaatgattttgttatggtattaggaaaactacacttaaaaaattgaaacaaatatttgctgcaagaagttagctaggggcactgtatttcctcatcctgccctgaaaagccacattagtgtggtagtttcaggtgtgctaatggtcagctgcattacttagctgcaccaggactggtagaaggagttggggtgagtagctttaacaatttttgaatattattgcgccattgccttaaatgcctgagaagtatgttagaccttaatacataagaaattagaaaatgtcattcttaaactttaagaattattaggggaaacattactaaacatttagtttaggctgttctttaaacacatcatctctatgaagtctaagatatctcattcatatcaatcagaaaaaaacctcactaattttcacatattctcctgataattatataagcatgctttagacaagctgttgagaaagcactgtttctcacgctctgtttttgactgggtatgttggttataatgttttatgtcatactcagaaaacccattgtagaaagttcaactgtgaaaggaatttgttttggatcattaaaaagtctgaatgtaatgtgggcttcagggttggttgattcaccagtgcagtgaaatctgaattctctttgtctctctactctaccatctatactctactctactcaaggacctgaattctgtctctctactctaccatctatagtgcttaattcacttgaggctggtccctcgctttgccatgagaggctgctggtggcaattgaggctgcctgttccgttgggtatgtctaggggaatgagaacttctataaccatattctgtcccattctaatatttctttttagtattaaagttaagatattataacatttttaaaaatacaagtgtaggtagagtatcttaagagtagatttcatctcaggagagtgaagagggtaatacaaaatatttgtattaaggagggttgggtctaccagagttggagagccctggcatagaaccatttaaactaggttgaagaatttggatctcattcttaagatgatggaaagccatgagaaagttttaatatttggagtttgtgatagaattttcattacaaaaagatcacccaggctgctatttgtggaagagattaggggagaagagtggtgtgtcccagagacttaagtcttttttctccattacgaaatgaaagccatttttatgtctaacacctcactcgggaaaggcatgccagcttcaatcttagttactgcaactgtctttttaagttacccttgagtttatgtaaatcagaattgattgtccttcaacaatagcaataacaacaacaaaaaagaatgttgtaaagaacaagaaaatattgattctttttaggtatgtaaaatgtgataaggtatgagaagagcttcaaaaaccttagactagtcatgaaaggaaaaagcattgaagtctatgccctgtttgggtacacatagacactttgtgtccatgctgcttgattccaagcattgcagggctggctatacaactgattcttttgcacaactgcttatacctaacagctttattggctgttctcaccttatgtgtcacacttctgtgtgcaaatctttggaatatttccatatgactctccagtatttggactttgggacatacgataaagcaaacatttgaaacctggagtcatatgggggcactcaaaaaatctgctgcttataagcaaggataaccaggctgagattttgatggacaaaattgacagctggtcagaaattttaaaatgcagaggcatttaagatgtcagaatatgccctcacactgcctaagagctctccaatatgtccttttagctcaccctctaaaaatcaatctctaatcttttacctttgcctctacaaccttgctgcaggctgatagcgccttgccagtggagttttgcaatggcccctgaacaagtctctctgcttccgttggaagtatgcattttccatactcatcacatacataccacattctatacaacaaaagctgtattttcccaattctcaacataaaaataatagaacagaatgtcctgtttcaagttttccaccttaatattttcttaacaagaaaagcaaattgatattaatagggaaaaattggagaaagttaaggtcaaacctttaatttttctgggtggtactgagattttattataataatgctttatgtaataaatatcataatacttctatagtattaaatggaatacctaacaaaataaaataatactttatagcataattgcatatatcagcatcatgattttctcctagtaaaaatgttttcagttcatggatgaaatttaatgtcagtttttagcagtgtttggaaaaataattaaaatttctgggtctcaccatctgaaatgatctgaaaacatctgtgctattggaattgaacccaagtatgctaaaatgtttatcgattgaactaaatttcaatcgataaacatgcgagtctgtgagctggaagtgccttttctaggatggggttcagaatccagggagggaatgagattagatacagtaaatcagtgaaaccagaccaaacctggcagctaaacagttgaagtggagcaaaacagaatgtggagttaaagcagcagaagtcaagccataaagcaaagatggatagaggcagtagaaataaatgggtcccaaaccactgagcaatatttccaaaatgccaatgaagaaaagcagtttttctagccatctcatcaaaactgtcttcggccaaagctttattctctctttagaaaaaaaaaaaaaaaagtagtgggagaaatcttagttctttacagaggtaattgtgataactggtgaggaggagataaagacgagaaagttagaatttgaaagcaagagaggccaggaagagaaatgatggtaatacgatgtggggtggagagatggaaggcaagccagaaacaaagatgtatgaaagcatgtattttcctaaacagactttcattatgtgtgttggacagtaagcaaatgcaaacactgagctaggtgaagcagcatttataacacacatgacaaaccaatacttaaaccatttaaataccaagacactccatgcaagttttttgaaagtgaaccacatgaaaactgggcaatgattatgaatgagcagtttgccagagagaaatagccagtaaaaaggaaaagttaatctcagagaattgctaagtaaaataagataggtttttttcccctgggatgtaggcacaacttaataatatatgacatccaatgctgttagaatgtggagaaatgctaggagcaatatatattgcttagcagtttggctgtatcattttaaataaaaaaaatacacatagcctttaacacagtaatctctttgtgaattattctgtatagataaaaatatatatacaaaattatttattgcagcattgttcacagtggcaaaaaaatgaaaacaaagaattttgatcacttgagactagttgaatgaactgtgttatacatgctatggatgattattaggtcattaagaattagaatgtatatctgctatggatgattgcacatgatatattgtaaagttagcaaagcaagttacaggaaatatgcaaagcatgatggcctttagtaaaaaagcctttatatttgtgattttaggtgtatatttacgcacaatgaaaggtattcaattaaaacacatcagacttaacattttgagtggtctgggaagagagaataagaaataaagcaagattcagaattgtctagaccccttgacccagaacctttagttatgtacatttataaggactagaaggatgtagaatagacttttgacatctgtagtgggattatgaatggttttatctttgtttatttcattttttggtctttgtttttctaaaattgacatgaattctctaagtggtaaaagccaaatttatttcaaaacgaagaaaaagtatagatgatattatgcccattttacccattaagaaactgaacctaattgatacctttttaaagattccagctagtaaatagcagagatgtgcttgaagcccttaggtttcatcaaagtgacagcaacttatagatcaataagaaaagacaattaaaagtaagaaattagagaaagacggaactcttagcaaaaagaatactggaggaaaatacacaccacacatgtgctaatggaaatgtcagccaagagcaaaagtcaatgagcccacctcacccctagcattaaactgcattgagaattgttagaaacaagggcatgttggagccccttgatttgtaacagagtgaaaagctttcagaaatgtaaaaaacaattattttatttggggcttacagtggtggtgggaggaagcagagagacacagaaagtgccaactcttgcccttgtttaacatttggcaaattagaaaatgtaatgactaaggaaacaagcacatttcaaataataactgaggcaagatgaagaaagtactagctaagaatgatagagaggtgagtgttgacgacacttgctaaggcatgtgctatacggctattaaatcacaaccctcacgaaactttatgagacgggcactgttgtgcaaatgagaaaacagcagaagtactggaaaatgtagtaacttgtctaagatgacttggccagtaagtggtagatatgatttgaggcacacttgcctgactgcacggcacatgttccaaaccactgtgctctgctgttactgggtagaagggaccatgaaaatctctttctagttgtgaagatgatgaaggtcatttgggataggtacttcccattcgggctaaaaaaggcagaaccagattgcttgtaagaccttgtaattctatatgttttcagatcctttcttgtgtatacaggaatctaaagatgcacatatgtggagttgggctattatagcacatttatttgcatcataatatgctatctaatgttcagcagcttgattttttccacttcatatgtcatagatgtctttccatatcagtacatgtagacattcaatatttttttttttgacagtctcactttgttccccatgctggagtgcagtagcatgaatactagatgttgcataatattccatcacacacaattgttagtggatttacttttttctcattactttgctagactaagcaaataagaatgaagaaggatttaatgtctgctgccagctctgctcctctactaaaaaaaaaaaaaaaaaaaaaaagttgggagggatgttaattagttgactttcagttaactgtaggaagagttaggttcaataccatttaagaaaagcaagaaaaataccttggtaagggctgtctaatcgtctgtggtgtgtgtgtatacacatatatatatatatatatatatatatatatatatatatacacattcagatacatatatataggtttgtatatgtattaatatttaatgtatgaatatagcatgacataattatgtaaaattaatgttaatacatatttttaaaactaaaaatgagtagacaaaaagcttctctgaagcctttttgatttctgacttttgcagttttagtttgagacataaagcgaggttttagtgcattctgccatctaaatacagtttagtcttttagccgagatcacaaaatgtaacaattagtttaatgcacacagattagcagccttttataatattaattgcaacaagaggcccatttatgtgccataaaatctaaaccttgcctgctttatctgtgaaacaaatgtacatctcagacattcgttgtcctttctaggaagaccctggtgtatttgaaactctgagttgatgacatgggagttcataaaatgctcgggagatttcggccatgtttggctgagaccttctgaaaggagacaaacatgtaaatgaagtcaagtttgcagacctctgggatccattacagcctgagatgctcttaacacataattagccagggccgttaatcacagttaacaggtgttgagtaatgaactgagacagggtatttgctgtgaccactttcttctctgatctggttagtcaggctaatgctgatcagagccccgggaacattctgaaatgtgacttgacaccatattgtcttgatgctgtcatctgcctcctgatcattgagaatgatgacattcagtataaaaacacagtaggaatctgttcaggagtcccccaagtgcttttaattatgtgttctttgagtttttctattatattttctttgcctcttttctcatttaagcctatgcctttgtcagctagttgttgaaagacaaatccaaacatttatgaacagcaaatggctccgtctcagcaaatggacccactgtgttctgtgatcacagaatgatgaaccaaaagtgaccgacctcattctctaacgaattttttcactgccataatggtgcaagtactaaaacctctaagtccgagcatagcttgcatttttactgaacagttgcaacttgctttttcaccatgaagtttcttgagtatctcttacaattgtatgtgataaattattctttttgctaacatagtattagcatagaataacataatattccagattatggatgtagccacacttttttagccatttctctattgatgatctaatagttgttctcaaatttttttttttttttttctttctgagatggagtctccctctgtcgaccaggctggagtgcagtggtgcgatctcggctcactgcaagctccgcctcccaggttcatgccattctcctgcctcagcctcccgagtagctgggactacaggcgcccgccaccacgcccggctaatttttttgtatttttttagtagagacggggttttaccatgttagccaggatggtctcgctctcctgacctcgtgatcctcccgcctcggcctcccaaagtgctgggattacaggcatcagctgccgcgcccggcctgttctcagatttttaacgctacagtaaatgtctttgtccatgcctccttgtgcacatgagtaggtatcactctaaggtagcagttaataactacagctagctgctaagccaaatcatgcctgctgctgttttgttacagcctgcaagctaagaaatgtttttacatttttaagtggttgaaaaaaaatcacgatatgaatatttgacaccagaaaattagataaaattcaactttcagtgtccataaataaaattttattaaaacacagccaagctaattcatgtatgcattgtctgggactgctttcacacaattgtggtagacttgagttatcatgacagactgtaaaaagtttcacaaactctaaaatatttactctttgtccctttacaggaaaaggttaccgaaatctgttctactgagtgtagaatcaataggaaaaaataggatttctgtatcacagcatttaaaacaatttttttaacaaactgtcaaatgcccttttattggttgtatcaatttatggtttatgagagagaatacctatttctcctcttcttcaccaatatttttatcctatgaatattgacttttttatgatcttatggggaattttgtgatattttgctgatttatttatttaattatttgccttttcaaaattctgattagattggccatcttgttatgtttattgggcctttatgttttttccactattttattaactgcatcacatgcctcttaaaagtaataatttaataagaattaagataacatgtattgaacaactgtgtggtaggtactatgccaaatgattcaaaaatatgtaagctattatatataatatattttacactataattataattaatggaattaatgttatatataattatattgtatgtaataataatatataatagtattatataataatatcttatataaaaatcccaaagtaattattattattttatagatgaggaaagtgaggctcagagaaatcaaatcatttacccactttcacatagctaatccatgatagagactttttttttttttttaactcaggcgtttgtcttcagtttctacccttcactgctaaacattctgtctctgagcttgatgttggatagatatgtccagtgtaatatcagtggaaaagactttaagttagggattctcttattgattcatatacttggttgtccagcacctgtgaatattttcagacatctaaggatttttcagagtctcaagatatgattacactctgtttctctttattttaaaaggccaaatcacataatgcttttaggagaagctgtggttgccaggaaatcgtttaatgattgtcgtagcttcacaaaggttagcaatcatgagctcagtatcattgaaataaatgtattattggagtcagaaaccctcagtttacattctggctctataaattatttggtacatgatcaactacagacaagttgctttgctgaatcccattttctcatcacttgagtattatttttttaaattgttaaaaactaaagggagtacttttaagaagtgcccagcagtacctggcacatagtaaaacttcaattatctctatcaaaatccataagagattatccatctgggttttgccatttacagggtaccatgccttaactaggtatttctcaaactgtggtccttaatctaccagcatcagaatgcctgaggatgcctattaaagtgcacattcccgggcctcacttcatctgattccatcagaaactctgaggatggctctggtaatctacaccattaacaagctcccaaatgatttgggggaagactaaagttgagagctacgaaactatcaaaattctggtagctttctatctaacttttcaaatactaataaagattatcttcctttggaagccagttaaatgtttcaaaccagatgaggtcaagggtatcttctttacttataatttagatcattcttacaataattgcatgctcacatcttctactattaacagaaatgccttccttgccgtaatcctcagaatgctctatgtttgaaggcagatgccaccttttgatctcttttatcttctctattaaatatgctctgataacatcaggttctttggatggtagatactgtgttaatatagcaatgctttgtaaaaaatattgtttgattttagagttggttctttgtattccttgataaatttgctttcaggttcttagcttagaagagggagtaatagaggtccttcctttggcaaagataacagtagtggtcatagttgtcttgatcattagactcactccaagtcctagacaggttctgaatttggcactgatattgtcactgagcatgtgtcagggtatctagagcttccctgcctactcttccaacctcagctcaggcccctttctgtctcctgcactatgctctagtccggtaattctgcaaagtgtgcttcctagttcggtgacatcagcatcacctgggaacttactagaaatgcaagttatctgcctgactccagaactactgaatcagacactttggtgggtggggctcagcaatctagtttaacaagccctccatgtgattccaatatatgtttaagttagagctccatctagatcctagaatttggattcataaaggcgtttcctaaccactgtatgtaaatgcatttctctgtcatccacccgcctatcattccagtctttatcattgtgcctcatttatttccttcatattctatcacaatttgtagttacatagttatttctgttgtacttgaattttgtctgtttttctgactagattgtaagctttgtaattgctaaaaccataactattttattcaccaatatatcccctaacatgtagcacagtgcgtagcatgtggtagttattaaataaatatttaaacaaatggatgagtgaatggtctgttaatatgaagtgactgaggttatgtttcttctgatctgcattttttgtgtgtttgcttttttgttattgacatggacaactacatactaccagtttcacagctaatttgtaagcagtttaaaagaataatttacaagccacatacacatacacacacacacacacacacagagttccctgcagtcaacttgctttgcagctttcaaatccaatggcaatgcctttaccactatagacatttccatttcagaagagacagtggtcaatttacctaacatgcacttattgagaaatgaacatgtggtatatcagggtctggcaaccagaaatggaatttgcatggtacttcttaagtaagacctttaactctattggccaagtaactcctatgttctgagctactttcattgttaaaatcagggaagtcgttgcatggttctctgcctttcttttcttagtgtttctctccctctctctctccctcttactcaccctaactccatgtctagtcctctgttcaacacctggctcagttgtacagtttctgaatttattaactctttgatgtctttcccttctatttaataaattttccttctgactagtgcttcaaatcttttctcaagggctggtgaaaattaattgctgtatgtagctaaaagaatgttcatttggtatggactcttttaccttctgtcaacatcaacaacatgtctgagagttagatctaggtttgtgtgttagtccattttcacactgctatgaagaactgcccgagactgtgtaatctgtaaagaaaaagggcttaattgactcacagttctgcatggctggggaggcctcagggaacttacaatcatggtggaaggggaagcaggcacatcttacatggtggcaggtgagagaaagcatgtgcaaacaggaaaaactaccacttataaaaccaccagatctcctgataacttacttatgatcacaagagcagcatgggggaaacccacccccataatccaattacttccctcctttgacacatggggattacaggtctctccctccacatggggaaattacaattcaaaatgagatttaggtggggacacagagccaaaccatatcagtttgagactctgctcagtcccttcctaggtgagaaaccttgagttacagtttgcccatctgcaaatgggctacctcctggtatggctatgaggaatgaagtgagatctgcagagtacctggcttttcttcggtggtcaataaatggcactctcacttgactaatactgagtacaattccagttatcttgggagagactaggaaatctgcagagagagggaaatgcgtaagagaggccacattaaaaataaaatttaaatcctggcagacagaagggagatgatgattgtgaatctctagggacctaaatgtgaaactggtcttatttatttatttttgtcctcatacactattgagaaaattatctgctaatggactatgaggaacgcaagctagtacatgccttttcccccaccttcctcaagatttttattaaggaaatgaaaatatactgcctttgttttatttacctatgtatctacttacctttagagatgggagtctcactatgttgcccacgctagactgaaactcctaggctcaagccatcctcatgcttcagcttcctaagtagttgagactacaggtatgtgccaccatgtcctgtttactttttaaaactttccaagctaaaacactgcaggtgtattatcttctctgaagataatacaggtgaaaaaatgtttccccccaccccaggcaagagaaaatactagagtagacaataaatacaaaggtaccactgaaaaatgattttttaaaaaaacatgggttctgacttaacttttctaagaagtcatccagcagtttttctagagagaaaagtcagattcatacctctttgggaattgtttctactagatatttcagcattgtcaggtggatccagctccaatatatttgtggcaggacatttacatcttttgtattttgtccaagattatacaacatgtgaggtttgttgaaagcattttcttttttgttaacaaccatctggcacacttttttgtgacctaatctaaaacacaattttaagtttttaccctgccaatcacaaaatagaccaacatcctccctgtcatttgcatgatgtgggaaataaacaacgttcagctgagaagacacaatccagaaagatcagccaatatattgccagtaggtccagaaatacaatatacatagtaattagctgtggctgtatgaaccctacaacgtttggcagttcctcaatgttttgtaaatggctttttccctgggagtctgttctcccctaatgtagggttactgcccttctagacacattaagtggattatttttctactcaagtaagaggaggttataaaaaataatgtgccatttttccctacaatgaatgctgttttctttgttaatttccaagttgaaataagaagagtgtttcttcttaataggagtcaaaatgtcttattgaacagactggggagacccaagtcatcagatttaagaactagttcaagatttttctaatatgtaaagaatactggcatcagtatcatgtaattttgggtgcttgaatcttagatcgttctatgatggtgcagacagaaatcctttatgtgtatttaacatatataacataccattttagatatataggtataaggggttaatgcttctccatctcctgtcaaatttgtctcctttacattgacatttggcacactactccaatttttctatctgcctcagggctcaagaattaatggtcaagaagaaagtacacatattttgcaaagaccaaaactttaagttctctgtcttattactccatataggaaagagaaagatcttgggctgtggtgtctgtgtttgcaggaagtcattaaataagcaatatgagaatggaagtgagcttggatgtataaacctcttaacatttgaaaaattaattttagggtcttgaatcctctgtcctacttaatagttttccagggaaattatttagctaattaatctcttatatttttaaaaatgaaatgaagaatatactgtttatcttacatatggaaatttgactctgcattttaaatacaatttcatgaatagtagccagtatatatgttaagtagtcacccaggaggtgttatttgcttatgctaattacttttcaaagtaaaaaaatgctgtgaatactttggaaatttatttttggcaattaaaatatttaaaatcacgtattacaattcttttatccacgataaaaccttgtgagaatttattaataattgcttgatgggaatgaaattaacctgtgtcagtcttataaataaaaatctccaatgtaaccagcttgtctgtcttcttttctcctctttagacatagactttcttttctttagtacccttaactccggagaggcttgcaattatccatacattacctgccatcttgtaccatctggataacttgctcatctattcctattatcttctcagtggttaatacctcacctagctttggcagaaatgcctgatacctccttgcctctctctagatgcagccagtaagcagcatcaaaacgtggcatcactttttgtaacttttacctatgctttcagttaaacaatagcaggttcttagtattctgaattatcctgtattttgcttctgtttccttagatttgtacttcttgccagaattattaaaataaatctgttagggtgttgtttttgttcgattttcccattatttaaggttgaatttagaagcttgcttcatctataataccctataagcttttaaacagatggaatgcatatctggtttttgagccatagcaaatattcctcatgctccttcaaagatacacccaggagaaaatctaaagaaggttcgtgtagcatgggagtattgagatttgctgaatgaattgcattgttgtgaaaaattgagatttttgcattgtattttgatgataatctgtccctttcttgattaactccaaaatgacttattctctcagggaagtatgactttagatgtattactttcagcaagaaaatgttcagcttttcaaatggcttgagtaaactgtaactagatcactgacatcttagtctatggttattacaaggttagttggcaaaccaagttcctgtggggaaaaaagttaatacaaacattctaacaaatgtaatttctcattacagctataaatatccagagtccaaggttacagattcacagttaaagtaaatctttcaatttgtgcgatagatcattgccagctctggtaaaccaaatgatgcctatattcagctttacaagaacacgaactccacagattggtctcaaatttcactttactttaaatagtctttagaccttttctttcttctctctaaacaaagggttatgattactccaggatttatgttttcagtagtgcttgggttaacagtttctttgcttagaagtttacccctaaatgctctgaacctaatagccaatgctttaattataattttaatcaaggccaagtaaaagaactttgggcttatgatttacttttgtaacatacactatcatattcagtatttacaagaatccaatgaaatctgtactctcctgttttgctgagaaggagactgaggatcaaataaatagtaaggaacttgcaggagtcacccaactcttaagctgcaaagttggcgtttgagcccccgagtctgactccagactcgagtccctaaactctgtgctacagaattttttgctgtcatctgctggaggatatccattctttaatctatggcaatactcataaattctctcaggaaagccactggaattatggcttttgttttttgtttttaaaaaagtctattccctgattatggtaattgatctttcctttgagggcaagtgccaggatagaacttaatcaatattaaagtcatatttcattctaatttctgtagtatctcctatcacattagatcttaggaaataccaagttgataagtaaatgatacacttggcccagatgactgaccttcattttctgttgtcaattatttctcctcttaaccctcaacatttcttttctctccctgattgtctctcctaatctcctttatttttgtcttcttgagacattcactgatctttttcctttcttctttttcctcatcctctatcattgatcagtaaagaccctcaaatctcattgttttcacacatttctagtacagtcattccttgccccactgggttttagtggacttctggggtgtccacatcatgttaatgttgtggacgcaggtagttgtcctagtggatgccggatagacatatgtggattaggagttgcaggaggggtctgacaatgggactttgttggcattaaatgttcaagtctatgcctggaagctgagtttaccctcaatttgcatctcaagtctcggctgaggaagtgtgttgaaactgggcagcacgtgcagggtggttagtccagtgggccgttacaacctagcacttgtccaggcagcttccttgaaaagaatgtttatagaattaatgtgcctgtgtgttacacacatataaactgacctatgttttcaaaagttacatggtgagtgctggttgaaaagacttgaggaaaattttctcagatagctttaaaatgaggcatgtgctgtcattggtagagccttcgtttagtatgcaactgatacttgaaatatgactttctctgttagtggctttaacaggttccagtaatggttgtgtgatactcttcattttattagggttcaacagttcatcaaagggaagagaaatgtaggggctcctatttgaaaaatttatgtgtgtttatttacacataaatatgtacatttgggtcaggtgcagtggctcacatttgtaatcccaacactttgggagcccaaggtgggcagatcatttgaggtcaggaatttgaggccagcctggtcaacatggtgaaaccctgtctcgactaaaaatacaaaaaatttagccaggcatggtggcacacacttgtaatcccagctatttgggaggccgagataggaggatcgcttgaactgtggaggcgggggttgcagtgagctgagatcatgccactgcactccagcttgggcaacaataaataaaaataaataaaatttaaaaaatatagtatgtacatttgcatatcctattcccattgaatattatctaaacttgcctatatttcttaactcagaagttacatgcatcctccttaacaagtgggtgagctagataaatctcaggggattaaaaaagattcaattacttatcttttggggtgaattgatgaataagaaactgtaatagcaaccctctggacctactaggcatctgtaattggtaggcttttccgacattttttccttcacagacttagcaaccgaagcacaaggtggattaaataaatgactaaataaaagagaaacagaaatatcatatcctggctccagatccatgattgtcagtagtgtgttacagtgtttttaccagtaacagttagcattgccttgattataagcaaacaaaagtagattctatttagcttaagcaaaaaaaaaaaaaaaaaaaaaaaaaaaattattggcaggctttgagtagttcactatatagactaaaggatataggagaatgagacttgagaattgacagaaagcagagtagattggggtttatgcatagcaagtgctactgaacagtcttataaggacaccacgatttaaagaaataattttcagttcttttcagtcttctgtttattttagtcaagattcagaatttagggagaaatatctaattggcctgaattgggaaatgtgcccaattttggctacgacacatctgaactaaacagttgccaacattagggaagaaggttttgggatactattaccaaaaattcatggaatggttgggctgctggaaacaacaaaagtcaggtgtataccccaccccaccccacaccaccccccaccatccttctctagaatttggcttctccacaaaatctgacaacaactttcaaatgaaagtccatattaagattgatctttacatgaaaatgattaacttgatccacaaaacatacagtgaaagcaaacgataaagaaaggaagctaataaaggaaattgatttctctgaagtgccgtgtgtctctttcgctttcctgcatatagcaggacagaattagtggcagcattggctccagtggtctgccaggctagcagtaataggtttcagccacgccttgtttgattgtattttgtctgaagagagggataaaacagctttgagtttgcatgtaagattgcctggttctcaggatcaggaacttcttagagaaaagcattcttaatggaataaaaggaatttaatttattgtttttagtattgtgccctgataaacacttttatgtcctttatatttgccttatgcacataatcatttaataagcaagcatatgtcaacatttattcttttaccaagcatgttttgagtggtggagcatatataatatcagctttttaaaagatgtttagcatagtacctgatacctccatattatgtgcagacatgcggcttttattataataatgattactacaaatatctaataataattgagcagttatgtgccaggctatactctatgaattttacatttgttatcttaagcctcaccacttaacatataagaagtggttgattattgttgccatgattccaatgggaaaattggagcttagaaaggagattggtcatttttagctgcagacaacaaagagttgtctagctgagggtttctcaagcatagcacagttgatgtcgttgggggctgctgtgtacattgcagaatgcttagcacaatccctgccctctactcagtagatgcctgtagcaccctcctagttgtgatagcccaaaatgtctcccaactttgctagatgtttggtggtatgcaggatttttcttggtctctttgccagttggggacctctggctagcgatgtaggaggcttctcttggggcactctacctgccacagggggcgccctgcccagtcagcccacctgggccaagtctggcttgcacactggttcccaagttcttgtcctattcccaagaagaatgaggatgcactgaacattgaagggtgaggaggtcagagaagaatttcattgagcattgaaacagctttcagtggagaggggtcatgcgggtggtccccctaccagaaggcgggaaagtcccccatgtatctgggtctgggaccttttatggactcagaatggggagtgcatgctgagtggtgtgtgagtaagcaaaaaaggttaaagtgaagacaccactcaaaggtgggcatgacaatttagaaaaccaattaggaaagggtagctatatgttaaataggtgaagggtgggttcagtcagaggaaagtgtgccaaatgggaagacaaattctcagtccagtccgaggatttaacttgtagctaggctttcaggctttaaactgtctttggcttggaagtggggttccacctggtacctacccctatcccatcttcctaggcatttggctgcctcctgtggccatcagtgggatgggagtggaggacaaaatcaccagtttgagaaccaattttctagctcatttgagaagaaaaacaaaaatatattataggatttctgctgctgctgcaacctggacatccttcttttaatgatcgttcagaaactgaattcctgtattgcttcctactccttccttgcccttgctgaatgggaacttggaaaagtgaggtctttccttctgtcttggtgagttaggacccataatactggaaacatctccaatactgagcttgtattatgggctgtgtaaagcctggtccctgactttaaaaacttacattcaacaaatccaaaggctattctttcagtgttcctataaaccaagccctgttgcagggctgggaattcaaaagacaggtgtggtcctagttcttttgaagcctatagtctcattagaatcaaatgtaagagcagtgtaatacaagttctatggtggagagaggatcaaagagctatctgtaaaagtcctgtgaatgagcatctgactaggtttatggaagcctacctagaggaagtgacttcaaaccttattttgaagaatgaaggatttttctctaggtcagaaagagggtcttagctactgtcacatcccgagacaactgagtagtacatactcagtgacctgaaataatagattctctgtctctttttgggtttgtttaaactgcacatttttgtttgtttttctaggtaataaatagcctcgaaatttttgtttaaaatctgacattttgaaccttctccattgttcttgttactggtggagtgtgtccaggttcttggcattttgaacaaagaattagacaaaacacacaaagcaaggaaagaatgacgcaaaaaaagtagggattttttgaaaacgaaagtattctcattggttgtggaaagcaaccaatcagaagctaaagtgaatttacaaagttgcacttctgtgcaaaggcagacttggcccacaatcagtctgattggttgtggacagcaaccaagcagatgtactttcaatttcctatctgccacgcagaaaagctgggggtttgcaaagttctgtccttttagagaatcctaatacacgatcccttcactctatgaaggattgctgaaaacactgacaagaggcagatgaatagaagaaaaggcatacaaatttatttgatcataattttacatgacatgggagccttcagaatgatgacccaaagatacaggggaaattgtccaattttgtacttgggctcaacaaagtacagagagccatatagaaatatgattggacaaaaaatgtgatctaatcctggtagactgagaaaacccagcaaggtgtgtctgcattcatctttgcctctcagcagcattccttgcttctgggtatggggcaggacgctttctggaatgggggtctaatgacctataattaagcaaggtaggtcagatagtttctttatggccagttattatgcaggaaggtggtagggattagaataatatttttaggttttgtggctggcctatggggagaaaattagaggctagagagaggagggctggagaaggtccaagagtcttttgtttctgaggccttcattttgggtattatctttctgagccctgacagcagcgatgtgcacatccattcctatttggtgtccctggatagttctcagaaaaggaggttaagcactgcatagttcagggtctgttgaaaggaaatccaagcaccaccagctcctaagataattttaacaaccagtactcttgaagctgcatgaagacaaacctactaattgctttttcctttgcccagctctgttgttaaaattctgctttctcacacaggttatttcaatgctgctttttctgtctttgtctatcccgggcttttacttttaaatgaagtaagtaccacttgaacgcttggactattggcttccattatcttctctgtagactagagtgtattattcatatgctaaagcagagaaccagtcaaaacctttgttttgcattattggtatctctgtgaaataagaattttgttctgggcatgagcatgactgtacaaaggtggtccttgaaagtaggtaattgttccaagtgctggaatgagagtaggtaaagtctgccaagacagtgggctattaaggcattctttttatttcagtaaatgtggattgagcatctactatgtactgggtactgttcttgaagcaatgactatacagtgactgatattcccaatcctcaagaaactaaaattctattgtgtttcatttttggactatttttagtccaaaatagtccagatgagtgctagtgctactttattacagatggtattgtatttctaaaccaggctttctgctctgaaacttagataatttgcaaacaggtgtctgtcagaaatctggtgcatgttgttgcagtaataggtattaaatgattagagtgaatcacttgtgaaaatgaaggctattttttcctatctcagtcaatatagaaataagcagtttttagaattagtgtactctttaaaggacactatctgccaggtctgagaggagttttaccaaggattataactatacctggagttgataataataaatttcatggcccaaaaagttgggaaaattagtgggggccacagtggaatccaaccagactgttgatgttggaatttacttcatggttggcttctcccacccacgtgctctttggaaaacttgctccctgttttgcaactgactgcatgttattcttagatttagagaggaaaagaaaaactgtgagtgacaagcccagatgtagtttaccttgcttattaatacaatctgatgtgagtgtctatgagattttctttttttctctttaaatccttctttaagtagaatgcaagatgataaagatcaggaggtaggaggagctggcagggatgggggaaacaatagccccttaataagactcttagtaatcaagcatgcattttgtgtctggagttagggccatggaagtgacagactgaccattttaaaggctgccatcattacagactggcatgtttctaattacgcatgaaatgaaaggcttcagagaagaaatgacccagaacactcaactgttgaggtatctgattaaggcaagtagggcttgtaaggaccaatctgcaagattatgcttgtccaaattgttttcaagactcatttgaaatttactctatttccttttatcttttctgtccaactgcttttgtaccagaatttggaatgttcaaatttgacttatagtcaggggtccaggaggaaacagattgtataatcagatttaatgggaggtattttagtaatgggattacttataaggtatagatagggttaaggaaactacatggggtggggaagcaccggggactaacagtggagggaagctggcatcacctctaaacctagaagggatcatgtgttatcagagccacataagagctgaccttatccaaggggtcacaatgggagttgtgggggtggagggttatagaaccatgacagtgagtcaatacccatcttctcttctctcctggcctccattctgttgcagataattctcactggccgaacctaacagtaagtcagaggatcagtgagtctggcaggtacacaggaaataacttcccaggatgcagatcaggaaggaaagagaatgcatctggtggaaaatgaggaataaccagcacagctgtctttcatgagcatgaaaccactttggagatcacatgtatatggaggtgaaacttggatttcacttcaaagtacagaactaaggaattcactaaaaatcttctgagcaatcactacaagcaaagcaaaaataacctttacaaatgcatagaaaatgtctttagtcatggatagatcctttaaatcaggtgctaccaggggctgcagaattgggtgtctccaggggcaggccagccgtatcaatgattaaattgatctaggtggtaggtctgttttgaactgttctctgtaaaggcaccaatttctatgcagcactaaggaatttaagcctaacattttcaggttgtctaatttttttttttaaccaaagaatttggattaagaaaaataaaatgatctcacttttaaatgttggcagctaattcaattttgttttttagagactttgaatttagactaacaaaatcctctcactgagatttcgcactgagatttcacttagagagatttcgtactccctaagttcctcagtcttttcagcttctctaatgatctaagtgcaaatggtgtgatcctgcttaccatggggagaccaactgtctaccccagcactttcagacacgtgtgagtttctgttgtgctcttctgccatctcttgctctggattcctgcttctgtgtgcatgccagcacctctgctcagctcttccccttggtgaccagcagatgtttcttacatatccctacaagccccagtgctctactaacccaaggttggtgtttctaacaccaacattgttagaacattcttttcctggaggtatagagataagagggtaattataggacaaagcaggaatccatttccagtggaaagtctgatgccacgaacttggccaccctcttatatggagctcctcttggagctttttcctctgcaggccccaggctgctgccagggtcctccatcccctgcttcacattacagggcttctttcacctcctctgttctccatgtctccatgatgtgctctccgcttccatttcttaccctgctatagtatctagggacaactcctgaattcctgttctacagattccaactcatgtcacattctgttgcaacctcttctgctctaggcttggctcttaagtaactcaaagaccaactaaagcaatcctacctaaaagagcacttatttcactatccagagtactgccatccccatagagcacccggcttagtcattgctgacttacataatgcacctcttgtgtcctcttcctgtaatagaactgactgcctcagactagttcctggaggctgggagcaagaggatactctgaattcagaagcagggtttacttaaaagaaatctcatcctctgtaaagtttggtaataggtggcactatggacagctagcctaactcagccacagaaaaccttttctttttgaaggcatgattttttaaaaaattatgtatcatagctaatgagatagggactagtttcaaggctaaaaggtgattataatcacccacacagctgttgaaaatggtgtcctactttgtatttttgtttattatagtctagagggaagtaaattaccacctcattgtcagccaataatcattttcctagaaaaagtaatttatcctctgaaagagaatattcacctgctcacctttctgattgcttcattgtgtatgtgattgttaaactgcctaccgaccacgaaataggtgtttctatactccagatccaagacaaaagcagtccaaaatagagtgtgagtcagaagacttgagatcagattgcagtccgcttcccaagtcctcccatggcagtcattatgggagacagcaaatgtcacaggcattgatattctcagcatctattcctttgtgctcatcttttgggagaatgagtcttcacacactgtgagaagatactacttcttctatcctgagggttaagaaagggagaaaatgggatatttcttttagaactatgaaggacaaaatcccagtgcaaaaagaaaatgagagaacttctgcagaaaaacccttgaagttaataaagcagatatgatgataagaggaaactttttataggttataaataccttcagatgtactttaagccacttatttagttcttggccagcaaattattgttacagtgaccaaaaagctgatagaaagcacattttattctaaaagagactgattatctggcccaaaaataggttatgttagcatctttcaaaaaagtctattaatcacagtacttgcttttcaatatataataaaatttcattcttatgtatagactttccaccttttattccttatttttaagattacatgtgtatatgcatacataaatgtttttattatttttaaaacattttcttgtaacacatccagagtttgtcagtttttcccaaaacatagattttttttccacctatgtggtatatatattattttcttaactcctatgaaatcaaatagattccttccaggtaccttattccttccacaaaatttggattattgggtaatatggtaacattaatattttctaacatattaagtgtgtaatttactaagtatcaccctagatttcagacaaacattacaattctgcaaaactgatgaatacagattataaagtattcatactgctttaacagaacaggcttataactgattgtggagggtgggtgtggcattaatacctatgtgactgaccctgtgtatttgttaaatttccaatcaatgttaataaactgtcacacttgataggcaggatcagatttgccctttttgggttacacacacgattattactttctcatctagttagtttcttgctggctgaaatttttcttagagcatggacactggcattgtcctttatgagtcttttatttcctctccctttctagcattatacctcaaagattttcaggagagaagttgcagaaactcttgcttaaaataaaagtaggtattattttcaggtttccgataaccacagcttcccattcctcatagctacaggagaaagagagttaatgtactgccagatctatagtagagactttgaaaaatagtgatgcagggttttttgctccttagttcagctaggtccgagttcttgtctcacaaccaggaggaattaggctcgtggacactggagagttagtagagtagaattcattaagtgaaaagaaagctctcagcaaagaggggatgtggggagcggttcccctacccgaaagtgggaaaattctctaatatggctgaggctgtggcttttatgggctcagtaaagggagtgtgtgctgattggtctgtgagtatgcaaaaaaggttaaagcaaagacgctactcaaaggtgggcgtggcagtgtagacaactaattaggaaagggtaggtatatgtaaaataggtgaaaggtgaggatcaatcagaggaaagtgtgccaaacaggaagacaagttctcaatccagtccaagcatttaacctgtagcttggttttcaggctttaaactgttttcagcttggaagtggggttgcactggggacctgcctttatatgcctaggcatttggccgcctcctgtcgctatcagtaggctgatgtggcaccataaaaatgggccactgaggtctcttgttgtgggagcataactggctgaagaactcagctactgctatccttgatccactgctgtctcatggcaagtccaaacttcctatagtcagtgaatgagctgttagcatagactccttccttttacatgtgagactttctcactggaacatgggctcaaggactcctagttggcctgccagacctctcttggaagtaccctggagcctaagactccttcttcccaaacctcctatctcttcctctgcttcacaagcattagcatcatggtctggaagttcttccttcctaccctgctttcctcccccagtaatctcctaggtgtctaatgctgactttgtgtcttttggtcaaagaacctgagctaatgcaaagggcaagctgagctctgcttctaaattaatttaaaagttacccttcttttctacagttgcagtttattctttgaaaacttttgagtagagagaatactaccttcacagtgaagaatttgcttatctgtataatacattttctatgtagtttacatcagtggctacagcccaggtagagaaaatgcttgattgcctggtgcattcctatatgtgattttgtggacaatgaaaagcaaagaagtaacagtaataataaagccccttcccacatcctcccaaattaaacttagatatgaggaggataaagtttcctttttatagtgattctttaaatgttctggggaaaaagcaaaaaaaaattctttatatgtatccttgaatttaaactttctattttttcattttgaaataagttattgagatgtaattcacataatagaaaattaatcattttaagtgaacaattctgttagatttagtacactgataatgttgtgcagctaccacctttatatagttccaaaacattcccaaagtaaaacctcttacctattaagcagtttctcctcattctcccatccactccagcccatgataagcattaatctgtgttctatctccatgggtttatctattttaggtatttcatataaatggaatcgtacaatatattaactttttgtgtctggtttctttcacttagccactatgatttaatcttctgttcatttcccaatcaaaaatggccttggcaataatgtttgtttcaccctgcacagaagtggttttgtttttcatcgctgtctcattctgaagcacaagaaagattttcctttttgtcactcgctcataaacttatcagaaaacaaggggatttactccttcccctaacgttatatagctgttttctctagatccctatatgtgagtgacggagaacatacacagagtgtgcatcaactatataaagctgcagtagctatcaaaacataatccgttctttattttttgagggagtaaatggaagtttcaaattctaggagacttacccaaatatcaacaagagggccagacagtaggcaccagaggtagactgaactggcgagtgacaatacctgtcacatgggggtagttctgggtagcaagtgcggtatcagccccagctagtgtggtgcctggtaggtagaaggcttggtgtgttagctgttggtgtggtgatctgtgatgtggtgtttgtagccattgttgtggagttgacattatttaccaccaccggacaggtacctctgtagtctgtgtctttttaaggatggaatctaagcactaatcaccttccaagaaaaagttaataaccctgtccaagctggaaaaatggcaattgataattgcaaaattctattgtaaatgaatgtcaaatcagaattctggtatccatttctttggtgatgccaagcaaatgaaaccctgccacttgtcctgcattcaaactgaaattggaatttgatcttgggaattactttcttgtctagtatttgactgatcaaatgtaactccttcccttttaggcccctttctttcttccttttaaaaacctttctctattcatgaagcacaaattagcctttggaagactctctatctagctcataaactcgttaccttcttcctcagaggcatgactcattcgcttttgtctctcgacttcttagattattccctttccttacatctcacttttcttttactgtggaaaggaatatagtaaatgattaagagtgaaggctatggattccactttttaattcataccgcctaaaagctgggtgcctttgaacaaggattttaaactttctaatcctcagtgtctgcatctataaaatggggagataatcatggcttaatgagacagtccatataaaatgctcaggacagctcctagaacatagaaagtgtccaggcagtggtatctaaaaacaatgatcatgatgatatggcttatctgtgttcctcatccccttgccttgcagaaattatcagcttcacaaagcaccaccagctgtcaaatctgcatctagcctgacctttctactcaattctatttctgccgtttcaactacttctgaatagtcccactgcagtcctctgctttcatcttaaatgtgacttctccaaaagccacattctttttgacctttgtccatgttattttattgtatcatctagcttcagattcatgcagtgatctttaaatacttctgaatagctcttttccccacatttctgcagttaccaagtcctatatagtcttccttcacaacttctttgtcatgtatttacttctatttttatggccacggctgcagatgaactctcagccactatccttctggacttaatgcagttttttaagtgatgatgatagtggtaacagtggtagtgatgctgacagcagcacagttaatgttcgtggagaccttactttgtgccaggaactattctaaacatatataatatgtatcaactcacttaattctcacagcagacctttaatgtaggtactagtatttcctccattggagatgaaaaaactgaggctcagagataataagtaaccttcagaagaccatggtgcatatactcagttcaggatgtgaacccaggcaggtacctgtgtccttaaccatggctctccactgccgcttcatcctttccccttctgtgccaaagcattcttcctgctttcagtcctcttgattttgggcatgttcagtccttttgattttgggcatgttgctcccagattaacataacatttgtaggtactgttttttgatttaaagaatggaaagtaaggagaggcagggcatgctgcctaagctttaagtgggcatttagcttacctgaaattgcatagagagtgggttgatctgtttctcaatagaaagttaagaactgtaatttagagaatgtctcagaaactccttggattagccctcaaggctctcctcagtctctcttcaatgaattttctgaagtttttcacctgctattcccattcctacacctctgacccagtcaaaccagtacattcagtgttttactctatcttacacatccttcccccataccctgaccctcacccctgaggctttgcttacaccataagcctatcctgagagactcttcttttcccctcctactcattttctttcccgtccattctccagagtttgctcttggtccagctttctttagacatcttcctggatcaatccaagctgggaacaaaagaactctcttgcagttattactgaacgcagagcagggtggcaaatgcagaggcccacaggagccagacagagaacttactggagtgaagagaatccaagcctggcataggtggcattattatttagtaccatgcaatcgttgccatgtggggataagagttcatggttgccagaggcctcattttttccatgaggtaatggaaatccagatatttagatgtaagatcttgaatttttaaagttgacaatttatttaaataaaaaaaacgtaggaagaaataaaatatgatggagagcagccaccagttttgacttctgctatggagtgtgttgtccacattcttcaatggaaggactccacagtgtgtgaggaaggatcttttatttggtcagcttttcctaagccacttagaaaaaattggtcctcacttatttcctttgtagaagtgtatatatgtaaaaattacatgcaaatttatatataattatatacataagttatatgtaaaattatatattatatatgtaacattataaataattttacaaaaatatatatattttttcaattagtgcacaaagtttgaggatagtacaagaggacttcaaaaagtttgtggaaaatagaattgaaagataaattttttctcaaaaaaaatctttatttcctcaacataaactccatgaagtttaagatgcttttgtaagcaataataccagccatttagtccatccctaaagaattgggggtcaatgcaatcttgattacattattaactgaagaaaaatgagtgccctttacagactttttaaaattaggaaatgaaaaaagtcagaaggggccaaatcgggactgtaaagtggatatctaatgattttccatcaaaactctcacaaaattgtcctcatttaatgagaagaatgaacaggagcattgtcatggtggagaggtgctttctgatgaagcttccctagctgtttctccgctaaagcttcagccacctttcccgaaagactctcataataagatgttatcattctttggccctccagaaagtcaacaagcaaaatgtcttgagcataccaaaaaactgtttccatgacttttacttgtgaccagtccacctttggttttactgggccccacccatttccacctcttggtagccactgctataattatgctttatcttcaggatcatgcgggtaaaaccaggttccatctcctgttataattcttctgaggaatgcttcaggacattaatctcacttggttaaaatttcagtagaaagctcttgtctgcagctgatctgtgtgcaacagttttggcacccactgagtggaaagtatgttcagctttagtttttcagtcagaatggtgcaagatgaaccagttgagatgtctacgatgttgcctgtttctgctgttaatcatcagtccttcttcctcttcagttaaagcatgaacaaggtgaattttttccttggaaattgatgttgatggtctgccactgtaggcttcatattcgacatggtgtcatttattcttataatgaattatccatttgtaaattgctggtttattttgggcattgcccccataagcttcttgtaaagcatcagcgactttaccattcttccatccaagcttcgccataaatttgatgcatgttcttgcctcaacattagcagaattcatgttattcatgttgctctgatacgggatcttttcaaactgatgtcttaatcttcttagtgcctcaaactagatcctactcagacatgttacaacaagttagtatgaatttattttgatggaagaaaagtttgaaatctatgcataggattttggaacatatattttgatgaacttattgaagcctctgcataatgtgataaatattaagtaatctctgtattgagttgatcataaatgatatcttgtttcagcaccacctttttgtcccaaagagtaatcagaattaaaaaaagaaaaaaagaagaaagaaacattaaggaaaggcaccagccaagagttaattagcatttggctcaagacacattttaatacatataataatgcattatcaggcagcccctcaatatccagatttttatgaatacagtcatccatcgcttgatgaaggggatatattgtgctaagtgtgtccttaggtgatttcatcattgtatgaacatcatagttacttacacaaatctagatgggtgtaacctactgcacatgtaggctatacatacctgcacagcatgttattgtactgaatattatatgcagctgtaacacaatggtaagtatttgtgtatctaaacgtagaaaaggtacagttaaaatacagtataagaagtaaaaaatggtagacctgtacagggcacttaccatggatggagcttagactggaagttgctcaggatgagtcagtacataagtgatgagtgcatgtgaagggctaagatattactgtatgcttctgtagactttataaacatgatacacttaggctatgctaaatttgtttaaaaacattgatgaagaaggaggattgcttgaggctgggagcttaagaccagcctgggcttgcagggcaagaccttgtctctaaaaaagaaaataaataaacaaaaataaattttaaacatatttttctttcttcaataatctcagcttattatagcttgttcttttttgtttttgtttgcttgtttgtttgtttgttttttgttttgttttgtcagacggtctcactctgtcgcccaggctggagtgcagtggtgtgatctcagctcactgcaacctcttcctcctgggttcaagcaattctcgtccttcagcctcatgagaagctgggaccacaggcatgtcccaccacacctggctaatttttatatttgtagtacacacatacacacaaggtttcaccatgttggccaggctggtctcaaactcctggcctcaagtgatcctcccgattcagcctcccaaattgctgggattacaggcatgagccactgtgcccagcttattgtagcttttttactttataaacttaaattttttttttagctttctgacactcttgtaataacatttagcttaaaacacattgtacagctatgtacaaatattttctatctttatatctttagtgtatttttttatttttaaatattagattttgttttttttctttttaaagttttttgttatagactaagacacaaacacacacattagcctaggcgtgcgccaggtcaggatcatcaatatcactgtcttccacctccacatcttgtcccactggaaggtctttagggacagtaacaggcatggaactgtcatcttctgtgataacaacgccttcttctggagcaactcctgaaggacttgcctgaggccgttttacatttttatttctcttttataaatagaagaagtagactctaaaataatcattaaaagtaccttgtaataaatactagagggtacggtttgtttttttttttttttttttttttagctccattacaatcttaagggaccactgtcatctatgtaatctgtcattattgaaatgttatacagtacatgactattgttagagttctctagggaaaattggactaaaaatttttcatctttttaatattaaaaatccaaatttgaaatcaagctttaaaaattgttatccatatactgatacccatatattgttactcagataaacaaattattttcatttgacaaatttaaaacaagtgaataaaatttgaggttgatagcttgcaattacattgattttcattttctttctttggtattattcaaagtgacaatgcttagataaatgtcacttcatcaacaacagttttgcaacagagagattgcagcagagagatatatggaaggaatgtgtgaaaagcgttttcagaggagcagatgaaaggctttgcaaactattggggtggtcagccgtcacacttgcctctaagtccccatgaacttgtgtagtgcttgacttcagtaagagggaaaaatgtggaggtggacagtggtttatatatgatgcaggaaagatacaaggagatgacagttagtcaaacacaaaatgttctgacaggtgtatagtagactcaagaataaataatgaaatgacagtgattaaaatgtgtttacttaagtgaacaatggcttgaaatatggctacacggtaaagacctcattatcgaccatacttggcacataaatataacacttatgttgaggggtaattaatttgctcttacaggtgaagtgatgggtcacttgtggcccagcctcacttctttgcactggacaagttaaatcctgaaacagacattctctgatagcatttaaaaatcttccaagccagacactcattttagaagctgttaggtagttgtaatttggagtgtataagcagaaagcctacgtgtgaggacagatgacagagtgaggaactgtagacagaatgtgcccttgggtgttactgaagcaagatgccttactgcacattttctatcttctatttctgaaagttagtgttcaaaggcaccgttacctaaaacttgccataaatatcatgcagggtagtaagcctcacacttcagcatgcatcagaattacctggagggcttatgaaatcacaggcaggtaggcccttgctccagagtttctaacataacaagtctgggataaagcctgagaatacacatttctaagacactcccaagtggtgcagagggaccatattttgtgaaccacttatatggaaaaccaatcagggaatgcaaatgcattgctaaattgagtgcctttaataaggaagatgccattccagtacattagcaactagggtaattctcaggaacttacagccagacgacaccaggatgactaaaagtaggcagggtggtgctggagggacagacaggctgtgtgttctaagaatgtgggctctaggaatggatgtctgagtagcaacctgccttctccactgtgctaactttacgagccctctgtaccacagcctccttgtctgttagatacagatgacagtagtccctagccctggagttgttgaggcaattccatgagatgctgcatggaaacttggaacacaagagctggcatgtgcagagagctgtgtgattacttgaagacatcagtaacacacaaagaggaaagtaagtagcaatgtatgaatgcatatatatgtgagagatttgaaaatattttctgtcttctcagatctggatatcaggtttaggtcttgtgtggtggtttcgttttgtttggagattgggtctctatcacccaggctggagtgtagtggcatgatcgctgctcattgcaacctccacctcctgggcttatgatcctgtcacctcagtctcctgagtagctgggtctacaggcatgtgaccaccaggccctgctaattgttgtattttttctgtagagatggggtttttccatgttgcccagacaggtctcgtactcctggactcaagcagtctgcctgcctcagcttcccaaagtgctgggattatgggcatgagccaccatgcctggctagggtttgttaactcaagagacgtgccttgtgcagaaggctatctgaagtacatttgaggtgagttattcatcatatcaataccatttgtgtgcttatttagggggttaattttatctcagatgtggttagaaattgtcttagtccatttgtgtgctgtaaaagaatacctgagactaggtaatttataagaaaggggtttattcggctcattgttctgcaagctgtacaagaagcatagcaacaatatctgcttctggtagggcctcaggaagcttctgctcatggcaggaggggaaggagaactggtatgtgcagatcacatggcaagacagagaagggtgggaggtgtcaggctccttttaaccaccagttctgaaggaactaagagggagggctcactcctttgagaatagcaccaaaccatctctgtgggatccgcccctgggacccaaacacctgtcatcgagccttaactccaacattagggatcagatttcaacatgagactcagcaaggccaaacaaaccataagcaaactatagccaaaatatttcagatgtgattgtggaagataagtatggtgtgtttgagggtatagtcgcttcaaaggcctgtggtgacaataatggtgtgagagggacagagagagaagtcaagagagtggagaaacagacagactgagacacagggttggagaagaaggggtagagcagaggcagaaaggtgaggggggagagaattgggaattcaggatgatgattattgtttccaaatgcttttgacttgtgttaaatccagccattcttagaattcgagtaatcccacctgtacatgtccacttagaccgcaaccaccaaggagcctgttagatgctaggcactgtcctctcacatttattttgatcagttcgggaagttttaagtgtccattccttaggaagtataatagaaacagaggtgaacaaagcatggtccctgcctgcagggagaatgcagattagtgtgggagacattaaagaataagttggctgggcacggtggctcacacctgtaatcccagcactttgggaggccaaggtgggtggatcacttgaggtcgggagttccagaccagcctagctgacattgtgaaaccctgtctctaactaaaaatacaaaaaaattagctaggtgtggtggcaggcacctgtaatcccagctactcaggaggctgaggcaggagaatcgcttgaacctgggaagtagaggttgcagtgagctgagatagcgctgttgcactccaaaaaaaaaaaagaataaatagaatttccttaggcaaaggcagagaaagagaaatattaccaagtggggactttcaagagcagaccagattagaatcccagctttaaccctaacaggctatggaattgtggaccaccagttgcttgtccactctgagccctcattgtgtttacgctatagtggacatagttctgtttaaaggtcagttgatgcatgtaaagtggtcagcacctaccacatatcgtctggaacgcacacacagtaggcccttcacaaatgagagtgtaggttggtttctttgttaggtactgctcttttgcaggtagagtactgagattagactagtgattttgacccatgtgtgctatgattatagtagtgtatacaacagaagaaattgtttagagaagaggcaagaagtggagtgtgaggtcatgccagcatgaagaaagattgctgtttaccagaagatgctcaaaccttgtcctctgggtatatatgagagcagtcagggtagtcagcggtttctattgaaacaatgacaagagtacaggaagaggaacaagtggatggtgcaataaccatggatgtttttatagatattgtgaggtgaagctgcacttcgatagtcattgccttgtcattattgttgaattgtttcatgttgttctaagtccttgaatccctcaaatgtgctgccggaaaggtaattcctcaaaaaatgtgcagctcacagatggtggttgcggctcataggatctctggcttaagaccctcgctgtacagtggtagtcagtgggtgggaggaggggtgacaagaaggcagggaaggagagagtcttccagaggcagaagagaccagtgagtagcgtctatggaaccacactgccggggctcaaatcttgaaatcttggttctgccacatggttgctctgcagctctggccaagttacttacttgccttatgcttcaatttcctctaatgtaacccatggatcagttaccctgggtatggcactcagaagcacctgctacatagtcagctctaaagagttcgttatttctattatttcacctaggaaagatattcccaacttttgacatcgattccccagggtagggttaatctcttagagtaatactctaaaatcttatatggaccaggcacagtggctcacatatgtcattccagcatttggggaggctgaggcaggaggatccattgagttcaggagttcaagaccagtctaggcaatgtagtaagacaccatctctaccagaaaaaaaaattcactgggtatggcggtgcatgcctttattcccagctactcaggtagatgaggcaggaggatcctttgagcctgggagatcaaggctgcagtaggccatgatcgtgcaactgcactctagactggatgacaaagtgagatcctgtttcagttacaaaaattgtattatataaatatttaactcagaattatagtatacatactctaaggataactaacttatataaaatgatttataagattgttcaaagttgctatttcctttttcttaattattttattcagcacctttatgtctagtttgtagtaataagtactataaaactaagttttcacaaaggctgcttttgatttcctgcacctgatgtatatttgtacacttaacagttgtatacacaaagccatgtatactgcattttgtgggtgatttaaggcatttttaaaagttattgagtacttgagagcttaatccacagtggatgcttctccaccatagcccattagctggtggtcataacatttactgctgccttgtattttttaatctgctggaatagacattattatttccattgcatcttaagttgttgaatcaagtagaattcagagtgggacaccaggaatgggagaggttatggttatatagcaaatgctatattgtatgcatttttttcctcttaattgtttaacaaaagtctgttgtgttagcaacgtatctcttcatttttccttgccataatatattttttctgcttagaaggccatgcctattactgtgcagttagaacaaaatgaacatattttaaaactgtatagagcgaaagaaagggaaggcattgaacgtaaatttagacttctcacaataggtttttatataaatgatttctgagatttttttttttttttttttactaatgtgaaaatacctcctagctctgttcatctctcacatagtgtttctgataaagttttgtagtgtatctgttgaagagatactatgattcaaagtgctgggtttttgttgttgttgttgttgttttaagattttgtaatgattttctgtagtgattcacaatggggttggcccttggcagtttttatgtgagtgaaagcctgccttatccttgcacgttttgtttatgtccatgactgaccagtttcgtggtaataaagcgacaaagcaagaatgactaataaactatcaggggttaactactgtgcttgcttttcctttcctggagtgtgtgtgagagaaagaaaaacatacgactctctcctcgcatggggctaaagataccaaacctttaaagtgtataactggattatctcaaaggcaaagaacatcattaataattaggctgccacttaattctactttatatcatcatctctgttgtgaaacttaagatattatggaagttattattagattagtaatagtctctattaaaaattatctccaatttttttttttttttttaagacggagtcttggtctgtcaccaggctggagtgcagtggtgtgatctcagctcaccacaacctttgcctcccgggttcaagtgattcccctgcctcagcctcccaagtagctgggattataggcacgcagcaccacactcgtctaattttttgtattttagtagcgacggggtttcaccatgatggccaagatggtcttgatctcctgacctcgtgatccacccacctcggcctcccaaagtgctgggattacaggcatgggccacctgcgcctgtcctatctccaaaaatttaagctgatttttgacataaacattttccagaagtgatttagcactgtaaagatggtcatgtttttgcttttttgcaattaatatgtcttttttgacagtgagaacttgacccaacagtatttaaaggttgatgatgggttaaaaattttgctgttgtttagagagacaggatgaataaggatgaaacaaataacaaaatagcctctgttgaaaaatgctatttttatagtagatgtacctcctaactctctaaatggtcacatggacttggttaagcttgacatctgtgaaagacaaaatgatttttttttttcagtagctcatgtccatagaagtcctggaataatcatttaaatgatagtgatcatatgtagctttagggcatggttttttcaccttggcgttgttgacattttgggtgggataattctttgttgcaggaagttttccagtgcattgaagtatatttagcagaatccctgttctgtacccactagatgccagtagcactctcacctccaattatgagaaccaaaaatatcagtagacattgccaaatatttctgggtgggggttgggggagcaaaattgacccttggttaataacccctagcgatttggaaatacctaattaaagtttccagtgattttaaaaaatattgttattatcgtaatcataagtggcaaattattaaggccattataaaatgagatctcacccagtggtcacagatgaaataaaccagcttattttgacctcattacagctttaggaagtcactggcaagtaagcgcaaaagaaactcccattccctacatatttttctatcggtaaacatttctgtcgctctgttttcaatgccaattcattttagtaatgtaactcagatggtttagagttacagtagataatggctaatctgcctactaagtagagtttgttttttcctagtgaatgaaaatgcaaaagtattaatacagatgcttgtgtgctgctgaatttgatttgacaagctagtcgtgacattaccaagaggtctgtggaaggtaaaggtgttgaagcatgaagtggaagcagtgtttggggaaaaagattgctaatgatagaggtctgatttctcgttctctatgtaattccaaatgcatgctgtgcttgtcatttagaaattcagactagaccagatgctgcatttgatatgttgtatacagttctttttagttaatgaaagccctattggagtcacagtatccaaaaaacaattcctaagtgggggtaaaaaaacctctgattagattattgggttctatcagggaataatatggactcaagaatggagctttatcagtggcatagttgtttacttgacaagaatcaacagtgattttcagagtatcaggttcacatgtaggtaaaatggacatttaaaaaaattatcggtgttacttgtattaccaattcatacaagttttctggtttaatgaataagaagatgaattgtctcagattagacccagattgtgattacggatcgtattcaggactttatttaactctgtatgcctgaagaaaaacacttcgctcatggcttattttgaaatggcacgtggaaagacacgtgtaatttatgagatgtggcactcttgttgcatttttagtattttgtagttttatactgctgctaatgcaagttcttatgagccatgtttggtgtatgtgggcaccactccgcaattctatgtccgcaagagatgtctattccaaacactgtactttttttctactccaggatgccaattaaaattaagtaggtgtacatgtgaggcacaatccattggctggtcttgatttaaaccctggtcaaggtggtaagttagaaaatgttactctaggctagccactgtccaatggaaccatatttgtgctagtatagtagctattaagccatatgtggctactgaacacttgaaatgtggctaaggaatggaatttttaatttatttaattttaatgtaaatacctacttgtagttaccacctaccatattggacagcacagcactaggcctttgagacacattttctgagacacatgtttggatttgggattgtttactgtgggtgttctgaacacgccatacccagagttacagagttacagagccattatcatcacactattaagcctctagtctatccatgtagaggataggagaaaaaaaacaaaaaaggaaagaaagagtaatgattgtatataccagttgatactagaaagttaaagtaggaaagcctgatttacagaagcttaatatcaaacatagtcatctctactatcgaaagagagattggcagtcaatgcagatatatacttttaaatatgttctctttcctgttctttgaaatattatctgagcaatagaacagctttatatgtgcttttttttgttgttttatgtctaatgatcttttcttttcttttcttttctttttttttttgagatggagttttgctcttgttgcccaggctggagtgcaatggcacggtctcggctcattgcaatctccacctcccaggttcaagcaattctcctgccttagccccccatgtagctgggattacaggtgcccaccaccatgcccagctaacttttgtatttttagtagagatagggtttcaacatgctggcgaggctggtctcaaactcctgacctcaggtgatctgcccacctcagcctcccaaagtgctgggattacaggtgtgagccaccgtgcccagcctgttttgtttgtatgttccctcctaagcaatatacttctgctaaattggggaggcatctttggggctaatcgcgggaatacaatatatgggtaatataaaatcatttatatgtgacatgaagcaccaagctcttattcatgaactttttggttatgttaaaaatcatggagtttcaaaggctacaaggtcttggtcatatcagtaagtactaggaacactgtgtggcttttttgttacgcggttgccatgatgttcgcatagtggaaccaggcagccactcaagaagatgtactattactgggatttataaatgcttgtaaagcctctagtcatgttgagaccaagatatcagacagctattcactggtagaataacctatgatggataaaatggtctaagaaatattcatctttgccttaccgggtcaaaatgctcaggggtgttagaaactggtaatgataataatcgatatttggcttgcatttttaatataggtctgaaaagatggaaaatactcatgcagtgagacaactaaacttggacgtgtacggagacatgtagatattcacagcagtactcattttaatccattgcttttaaaatctgtaccctctttttcccataaggttgtacaaccttcagaagttactgtgagtctcagtatcctcgctgtaaaatgaaaataacgacactgactgtgttagaccaattatgttgctataaaggaatatctgaaactaggtaatttataatgaaaagaggtttgtttggttcatggttctgcagggtgtacaagcatggcaccaacatctgttcagcttctgcagaggccagaggaaacttagtatcatggcagaaggcaaaaggggagctgggagatcccatggcaagaggcagtgagagtgacaagggacaagcttctttaaacagccagcctcttgtgtgaactaacagtgagaacccactcattaccatggggagggctccaagctattcattacagatctacccccatgacctaaaacctcctaccaggccccacctccaactttggggatcacattttaatatgaaatttgaaagggacaaacatccaaactatatcagcacttaccttttaggattgctgtgaggcttaagtgagataataaatgtaaagtttctagaatagtgaatggatcacataacctcctgtctaaattttagctattattattgatgctgttgtttttgaataccttaaaggttatatgttaaacaaaattgtaaattgaaacacagaagccctagagatactactggtcaaagaatatttaggtaggtgttttgttttttcttcaacctaggtattcttttgcaacgcacatcagtctccctcaatttcatttattttgtaaattaagagtttcctataccaggtgttctgaaaactaggtatctccttttttcaaaaatggatctctaaaacttaacagatggtttattgtgacaataaataggagtatctattaagatgttgtctgattatacaaaactgtgccctaatggcttaacaatacttaaggtaattttcattttggtaatgacctgctctgaataccgaaataaatggcataccaaacttgttcctgttgaaccaacagtactcaatgttccagttatggaaagaaaactatctctaacttcttaaacagaagtgttagtgttactaaaatatagttcccaggaaaaatcatgtaacgtattttcatatttaattaatgtttcagattatctacattaagtatctaagtattaggattaactagataattatgtcagtcatcactgactgaaagcaatattttgggggaggtttggttaatttgacctatttcatctaggaagttggattctgattgtgggaattatctgggaagaatgcttctctttttggatggaaggatatatttaaatttagaatgaaatctatttcatatggcctcagggtgccttgcattaatgcagaaattgatattatgataaaatcttgaacaattagggctaagtatctaaaacccaattaacctttagcggttctcctcatagtagtaatgtgctctcattttcactggtctgggataaaattgattcttcatcattgtgcaaccaaagacaaaagtcagagtctacaaaaccagttttagacagggcacatgagcaattcttcaaggactggggatgtgtaccacctacttgattgtagtgcttgcaacgggctatattctcctccttgttagtgctttattttttttgaatccacgtttgatcttttttcaccttactttatgataatgaaatgaacctcctaggcttggcctttgggcccaggtacatgtaggagtaatcactgtgaactctgcatccctggcatggccagtgtgtctgaaggtcaggcattgctaacaagattcaaagacatttttcattttttagaaaacaaaaaagcaaaatgtcacacccatcttgaaattaccatagtagcaaaataattttatcatattagtttgacatgttaaatctgtgtaggttgttctgtacttttgaaagatacttcctttccttaaattattgctaaatgataataggacttggcacattatctttgaaataccaaggaattggtatttcaacctccaaatgattaatttaaatgtctctagatctactctgagaagaaaaatgaaagtgccacatgtaccctgatggtcttggtttgtaagctctatctgcaaggcagagtgcctcctgaaaaaccaggaacatacctgaagaaaatttaggcaaacgttacaattgttggcttttctgtcactcttcataatcagcctgtttgtgtggaaactatgggcgtttttaagaatagtctcgggaggctgaggcgggcggatcacgaggtcaggagatcgaggtcatcctgtgaatggtgaaaccccgtctctactaaaaatacaaaaaattagccgggcatagtggcaggcgtctgtagtcccagctactcgggaggctgaggcgggaaaatggcgtgaacccaggaggtggagctcgcagtgagccgtgatcgcgccactgcactccagcctgggagacagggtgagactctgtctcaaaaaacaaacaaacaaacaaacaaaataatagtctctcacattgcttcatgtgtttcagaacattacaaaatgagctttcgtctaacatatttaaaccattcattaattgtcctaatcattagtccatgaatttatgcaacacatatgtactgttcagttttcctttgtgccccctccctaaaccctgtgtcctcaatcagatgcatttcaggattaaaaagaaaggctctcactaggatattttcttaagaattcttggctgggccgggcgcggtggctcacgcctgtaatcccagcactttgggaggccgaggcgggtggatcacgaggtcaggagatcgagaccatcctggctaacaaggtgaaaccccgtctctactaaaaatacaaaaaattagccgggcgcggtggcgggcgcctgtagtcccagctactcgggaggctgaggcaggagaatggcgtgaacccgggaagcggagcttgcagtgagccgagattgcgccactgcagtccgcagtccggcctgggcgacagagcaagactccgtctcaaaaaaaaaaaaaaaaaaaaaaaagaattcttggctgggcatggtggatcaggcctgtaatcccagcactttgggaggctgaggcgggaggatcacaaggtcaagagattgagaccatcctggccaatatggtgaaaccccgtctctactaaaacaaaaattagctgggcgtgttggtgcgtgcctgtagtcccagctattcaggaggctgaggcatcgccgagatcgcaccactgcactccggcctgggacagagcaaaactccattaaaaaaaaaaaaaaaagcttaatggctttctctgttgcatgtaaacagaactgttttcatataaatggctcctccaaggatgaactctatgcctctcctgaacacagctttctttaggggcttatatttcagtcacctgtgtattttttcaactttcctagcatactgtgagtttcatgatgaaagatattattttagtaaagtaagaaaggataaacattacatatggagagagagataaatggatggatgaacaaatcagccaaacaatgacaaactaactgtatttcccactgaattataaccagtgttctctggaattcgtagctttatacacactgtccacttctctatgccaccatttccaatgggggtattaaaaatatctatgtcgtgtatggtattattttaataaatgtttatttcattttcaaagatggcagagaataacattatagagcatttgtccctggaaaaggtaatacgttttaaaggatttttttaaaaattagctaccaaaatctaaagataaaatgtgtcatttaaaccaggaaaggacagcttctttgtgtcaactttttcatacatcctgagctaaattgtgagtttgttttgcattgaaatttttcttttgcagagaagtgacatcattttcacaaccacaacagattttagagcaaaatagaagactcttttgctgaaggcagctgtgttttgagaatgtgtgtgtgtatgtatgtttgtgtttatgaaaaatctgtggcaaccacattttaccactgatttttataatttctggtggcattttctggacttttccagaaagttcacaccttgtaaacagtattccagtcttctaacatgaacctttggtattcacttaaccaacttattaatatctgatattatatgtttaagataattaaaagctttatttaaatggtaagtcagcagctctttgaatagacactatgtgtcaagcatgggggcttgtggtgtcaagcatgggcttttgtgggatcaagacagacctagttactctacttaaaatctcaataatttagtgggaaagatggacattaaacaaataattttaaacactatgtaactgcaaatatgccaagtcctacaaggggacacacagaatatgaatgaaatagaagaacaggagctgtcttcttctgcttctgcatggaaaccactaaccacgtgtagctatttaaatttaatttaaatttgaattaattaaaaaggaataaaattaaatgttcacttcctcaggcacactaccatatttcaggtgctcagtggtcacatgtggctcatgactaccatattgggcaacacacatctggaacatttttatcgttgtagagagctctgtttgacagcattgcatctataggatctgggaaggtctttctacagaacagttgattaagcctagatatgatatctgagcaggcactgacccagtgaaaatttgtgattgaggggagaatagtccaggcagaagacagctccagaatatgaaagtaactacaactaaccagttgtcttcacagaatggtattgctactcctctatgtatgtgtactttaaaatggtatagtagtatttatactttcaatatatattttttgagacagagtctcactcaccgtgtcacccaggctggagtgcagtggcgtgatctctgctcactgcaacctctgcctcttgggttcaagagattcttgtgcctcagcctcctgaatagctggggttactggtgtacaccaccacatctggctaatttttttttttttttttaaagtagagatggggtttttccttgttgcccagggtagtctcgaactcctgaactcaggtgatcctcccacctcagccttccaaagtgctaggattacaggtgtgagccaccacacccaggctatactttcaatattgatgtaatgatacaaaaccaagttctactgggtttctacttaaggatgttacattaagatgttcctatacagaatcatgaatctggcactcacaattattgaaaagcatttaaaaattgctaccgtgaaagtgttttttttggtttttgtttttgtttttttttttcaaaaggagcaaaaggaatgattcttgaagagcataaagtattttaccatttttctctccctcttctcattatcatacaccactgctacccttagagtctctcctttcaggctccaaatattgcagaaaccttccctgactcaactctttatcatgtgcattaacttggcctgtttcttattcttaatttattttgtaatatcctgttaactgactgtagagcagcaaagaaaactgcaagggctggttcagtgattagcagtctcttctacttaatagactttttaaaaaacacacagccacacaactattatcacgtctcaacgttgagaaaatattctaaatgttggtggaaaaattgagtatgcaatttgatcttgacttcgggctgcacaggttttaaaatcaaattattacttgaatatgcatattctctagctccacgcttgaagtccttctacataaatgtcaatgctttgcctaagaggccgtgttgtaggtaatctagtatgtgtgtgtgcttctttcttcattttcttagcatataaaaaatctggggtggaagatcctactagtcatgcctttagtctccaaagtttgttgttataattcacattaacgtgttttttttccaagtgatatgcttccctaaatgtaaagcttttagtcctgtttaatgatgcagagtagaattgagtaaaaacttacagaattgcattagcagcggaggaaattaattctggatcaccctaagtcatcaaatattgtttaaaaaaatagagacttcttactttaggttgcaaaaagtaactaaaactagactattttgcctggcacacattctcagtgggtcttttaaaatgatcaggaaagaattgtttataattaaactattaattctcctttagttaggttcctaaaagacttgagattgatagaaatatttcttggcttaattcttctgttttaagcatctgacaaggtcaaatgtcatatatgtgttatatgtaagaaaaataattcagagaaatgaggatattccagtgtcatgtaaatttcaagaggaaccaaaaccattacttttttaaaaagatacatgtagtaattgcaataaccagattcaccacatactagagattccgccttctgtgtagcttgttttaattgacttttctctacttcctgaaccaccaggaccaagtgcctaggctaaaacctccttattggcttttctgctaccagtctttctgcctttaatcttttcttccatggctactagagctgtttgaaccagaagtttgaaataggaataggagcgatttaagaatggcattctggttagatagacgttgtaagccgaggggcttctaatgaagttgcaccttgcattcctcaattgtatgttttttaggggtgcttttgccagtagtgactggacattttggggacaattgctggtctccctactaccaccaagatgagtctgctttctccactgagctagggagacggcttatacactcaacctgatcatgtccatttcctgctttaaaaacctttcatggcttcccattgtttttaacagaaagttctgatgtcctaagatggcctctgagctcctatgatggtggctctgcttattctctgcctagtctcacactatcgtgccttgctctctgtactgcaaccacactgacctgctctcatctcaaatgtggcaaccttcgcatttgatgctgtttcatttatctagaactttaccaagccattttcaaattctttatatcttagcttcaacgtcactttctcaggtcatccttctctgaccctatccttacccagcctccccacccaaggactgggctgtatcagccctatcatctctcccatgacatttatcacaattacaatcagatcatggcacacacaaatacagaattaatgtgtgccttctctgctaaactagaggctgttgaaggcaaggtagggtctcagtgttaacatcagtatgtccatcacccaatattgtctggcacataaaaacatttaatatttgttgaataaataaataaatttcatatgattttaatccaattattttgacatttttatttggtaggctctagaacagaaatgagtccttcatttgattatgaacacaccaccagtggattaaattcatctctattaacttaaatctttgtaaccagcctaagtcatttgatttccactctgaatatactgaactcaatatcaaaagaaactttaatttcagaggaagtacactgatcatatcagcctccaaatacattttaaaaaaaaagtctgtgagaaagtaggagccatagataaggaagaaataaaagacatcctaaagcaaattgagaatggaagataaaggaggcagctttttaaaaagaggttaatgcatactgaagtagatgtcactaattttatatatttttgccatcaggaagtaaagagctttcgattgtttgttcattgaagtagatcggcccgaacttgtactcatgactctttttgtcttggaccaataatttaaaatccaagtgtgggcatgtgttggagattcaggaagaaaaagaaaccaggaagataagcggaaaatacaatgagatagagataagcagacagactcatgacattaactctgtttttaaacataatgttctaaatagccaaattatggatgtgccacaatcagattaaccttccaatgatgtcctatagaatgttaataagaatttccaaaggaaagaaaagagggtggtggtgaaggggtggtgctctatgctcaggtaaatttggaaggttggcttaaagatgaatacgtctcttcattttctgacttctcacagaaggaggtaggaatattccacatttctcagactttttaggctaggaaacaacattgtcagggcccaagaactgacatctcttccaacactcttgttcagagaccatttgggtaaaagtacatgatgcatttaagccattctggagataccgccacaatgcagtgatgtatgtaatgaaaatgcctctctctgcagcttgtttataagctcaggctttatggtatgaaagaataggaagtgtcactagcaggaccgtgccaatttttacataattgtgaagattctgttgggaaaataaattagaattgtaatgaggtatgtacagaaagctccatttgatttatctgttagataaacattttgagctaaaaaaaaaaaaaaaaccccacaaaaatctgctaaaatgaggttaacttctcaaataatcaatcattgctctctctctttacttccccaatgtcctgctacctttgcaaatgaccataaaatcaatttatgaatgctcagctatctgggggtattttttaaatgtgctttggaaatagatttgcagttttattatattttctaagttacatcatagagcagaatgataactctaatgttagaagttattgcttttcattccagtaagattgaaaaataaaaagaagagccttgtagtaacctgtaaatatttttagttaaaaaccgactacttgagagccaggttcagtggcatgagcttgtattctcagctacttgggaggcagaggcaggaggatcacttgaacccaggagttcaagtttgccgtgagttatgatgtcgcctgtgaatagccactgcactccagcccagaccccatctcttaaaaaaaaaagctagaagaaaatatttaataattaaaatggttgtagcataaaaaagatgaatatttaaggtggtggatatcccaattacatttacactgatttattgcaaatatggtgaagcattgtgctagacacaggagaataaagatatatttgttatgctccctccacatagggaatttacagtctaatagaggacaaatggatcatttcaaatagagtccagtaaaataaacagattggaacaacacagcggtcagaaaaaccagagtcttctgtctcaggtgttcatgtttgatctgagacccaaggatgagcatgtggatggtttgccttgtgcaaacggcttaggttctgaaaccatatgacacgtccaagcaatttcaactggtttggtgtagctgggcaactaggatgtaaattattagagaagcgaattaaaaggcagtgagaggcacaaaagcaatgtgaacttttttctagagatgtgtgggaatacttagtacattttaaaacaggaaactatgttatcaaatgagtattttaagaagagcacttagaagctgtgttgtgaatggataggagggaagagaccagtttgaaggctgtgggaatagagtgagtgatttttaaaaaattgcattagagcagagatggaaacagagggacaaacttcagatataattaaaggaggaagctcttggggcttagtgatgcatcagacagatgaaagggtgaaagagaagaggggtataagtccacctctcggtgactaggtacatagtgcagccagaatgcagattcaggaagaggtacagatttttgcgggaacaagagaaggaattctgttgtggggtttttgaattcaaggtggatatctagatgaatatttaaactcttgaggaggcgcgaccttgaaatgttgacacgggcatctttagtgaattgacactagtgaaagccctgggaggagataattttattgggcgagaggttctggagtatgaatagaaaaacactccgaacagttaatttctaagatagctgaaagtgtattgaaaaggaaacctgtttttatgtcagctcttacacttgatttctttgcttgacctcaagttctaactgaattgggcttcagaaaacataaagttattttgaatcttggccaaaaatattgttaattcaagtgtatatctataaacttaacacaggtgacgtaagtttttctagcagctcttccttttacatattatgagtaaaatggcaccaggtgtgaggaattgagattcaaagctctcggacataggcagcgaatcatgtactcctatagcggatacttttgtctattaggataatacagatatgttacaaatatctttttttatgtaccttaaaattattgccaacatagttaatcatgactgtttttctctttggcttaaaagattttctgtaaaatactgttgaacttgtctttgtattggtttaatgagggttccttgtgtgccattggccagtggctaggctgtatattcacagagtgggactctgtaagacacagtagagggtgccttctgcagaactgaatgcttaacagaggcactgaaggtcacacaatgctgagagatattggagtcctgtcgcagccagtgtagaaggtcttgcttaacagcctagaagctcagttggggctatagaaggagacataccttaggagaatcacaatctaaaatgaagaataaaaccaaataggcccactctaacagagtataaaagcaagcgtgaaaggatcaagagaatctgccaataatttaactgccacaaaaatactcaatatgttaagggaagaaaagataatccagacaccttgggatatatcattcataattattatacaagtgaagaagacaactaatgaagaaaacaagcagtcactggaaacagatggaagatgaccaagatattagagttaccatagctataataatattgttaaagaacttaaaggaaaacatggatgctgttcaagaacagatgaagaatcttacctaaaaactgctataaaaatcaaatagaaattctaggatcaaaaagtgccatggctgggtgtggtggctcatgcctctaattccagcactgtgtgaggctgaggtgggaggattgtttgatcctagaattcaagaccagcctgggcaacatggtgagagaccccctctacaaaaaataaaaaaattagcaaggcgtgttggtgcacacctgtgatttgagctactcaggaggctgaggtgggaggattgcttgagcctgggaggctgacactgcagtgagttctgaacatgccactgccctccagcctgggtgacagagtgagcggtctcaggaaaaaaaaacaaagagaaaagaaaagtgccatgattgaaatatactgaatggagttaacagccaactagtctctgcatgctaaaaggtcagtgaactttgagccatatcaatagaaattatctaaacaggaaaaaaaagactaagaaaaagaactattttgagatgtattacacacttaaatataaatgcaaaaactgtagaagttctataacaaattagagaaaaaatatcttacagtctcaggcagagatttcttaaagagcacacaaaaagcactagctataaaagaaaaaataagttaataaattgaacttcattaaaataaaaaccttctgattatcaaaagacccagttgagaaaataaaaaggcaagctacagactggaggaaaatacttgaaatatatatatctgacaaaagacatgtatgcagaacatatgtgtgtgtatatatgtatatatatttctacaatgcttcataataacccaatttaaggcaacataaaaggtgaaatatttcaacagagtgcccaaagaaataaatatatttatatatatgttttttcaaatgccaataagtccattaaaaggtgttcaatatcattatttatcatgaaagtgcacattcaaaacaggaatgagataccactgtagatccacttgaagagctaaaattaaaacatccagtgaataagatgatggaataacagaaatgcataaacatagctagtgggagtatgaaatggtacaatcactttggaaaacagttcctcagtttctttttttttttttttttaaaaagatatgttttatgattttacagttccatttcctggtatttacccctacaaaaggaaagtatgtatccacagaagttttgctacacaaatgttcatagtcactttacttgtaaagattctaaactggaaataatccgatagtccatcaaaagcatagataaaatgttggattttcatttcatggaataaaagatacttcacctataagaagaaaaatttctaatacctgtaagtgcatggtggacttctctaaatagttgaaagaagttcaacaccaaagtgtacatactttatattgatttaaagaacaggcagaacttatttttggtgatagaaatcagaacagcagtttccatgaaagtggtggagcttgactgcaggtgagcactggagaacttcctagagtggtagaaatattcgataacttgattagagctttgtatgtgtgtatacatttgttaaaattcatccactgtaaaacctctataggtcataccatgtaacttttgctttgttgtttttaaaaattggatattttttaaaaacaagcagttaatgaattaaaatagctaattatgactttgcataataaatcaaggcaaatttgttcataaaggcatcaagtgtttcaaatacatcaaatgtattttgagtaagaacataatctgagagggtttagtttgagattttcccacttcctcgtttttgagtaagagttttcttagactttccaacatctttagaaaggagcaaaattagcaaaaactcccgtttaataaaaacagtgcattctctagaaaattcactaaaatgtaataatctttgaattcttttcagaaaataatctagaggtactttgaggagtgttagctatttggtcccagggccttggctcctgattgagaaatagaccctgggataattgaagccattcatttgggtttgaatgtccaggcagcattattacctgacttaattgaaaggaactaatgataaaacattaaaaacactgatcctctgagaattaaaatcaaagggccagcccattatctatgagtatttagtattcttaggggaaggttgagctcattttatagattagttgagtattgatgagtctcattgataatggcctaacacaaaaacctctccttttcttcttcttcactctcctcagagaacaaatataatggggcaaagtagaatctcaagttgaatctatcagatggatattttcacttagcataggtatagcctcaacctatataagttgacaaaatgatttaatgggaaggacatgggattaggaatcagagcctcagctagtcccttagcctttctgactttggtagggttgctgtctataggattgtcttagtccattttctgctgttgtaaaacaataccacagtctgggtaatttataaagaaaagagatttatacagctcatgattctggaagctgcaaagtccaagaccatgatgtcagcatctggtgaggttaatctcatggcaggggagcggacggcagaagggcaagagaatgtgagagaaagcttgcttttataacatagccattcccaacatcactaacatactcccatgataagtggtaacagcattaatccattcatgagggtagagcaccataacctaatcactgttagaggtcccacctcctgtaattaaatttcagtatgaattttggaggggatattcaaaacatagcaagggtcaaatgagatggcatgtgaaaaggggttagcaggctgggcactgtgcctcatgcctataatcccagcactttgggaggccaaggcaggcggatcccttgaggtcaggagtttgagagcagcctggccaacatggtgaaaccctatctctactactcatgaggctgaggcaggagaatcgcttgaacccaggaggcagaggttgcattgagctgagattgcaccactgcactccagcctgggtgacagagtgagactccatctcaaaaaggcggagggactgaacatagcgcctttttccttttaccaaaattcagttctatgcaagaaagtgatttgtaggatttctcgaggactcattttctgaaaacaaaaataaatcatgcaaagcaatacccattactgacaaatatgtacttgccatattattatagtcaggcatatattttattttgaacaccagttgtttggtcattcaatgaaggcaaaatgatttctaaatactaagtatgcttcaaagaggcattagcatctatgaatgttacatgctgcatggatcaagctgtttgttaatcaggtatattttgttgttacgtattttcatgagaggaagaaaaatgttccataatgaaatcaattgagagctaactaaagttactgaacattcagagtcaaatcatttaaaaacactagaccaggagttgactttctgagaaaccatgtcttaataataaatcttaagacgtaacactgatgttaaatcattgaaaattttcatagaaattttagatattttgatctgaaagagatggcttcctaagttctaagaacagaagtggtctatgactgtgatacatccttctttggaaataactaatgagttatgagaactgaattatgaaggaagaaatatgacttaacagaaaagaaagttgttttaatgagtcattaggctatttaggtaagtatgactcagttactattttaatgtaaatatgtgtggtgttaagatctattttaaaacgtgaattgtgatagaatttaaaactcagtgagtatataatgaactactgaaaaacaactttcctttttcaaaggtttaagcatgtattttttcagtaaatcaagtgattaaagggaacatgtaaccttacattcaaagtatatctggttaacttgccttccctctcctccatatgcatttttacaaagaaataataaatttatgttgaattttgattttccagaaagatcccaattttagtggtcttagtattatatataatatagtattaaatacatatataatatatactgtatatataggtcttagtattatatatataatgttctgtttatatgtaataatatatgagagagaacagaaccaatagaatatatatatatatattcagatagatacatacatacaaacatatatatgaaattgtttcatgtacttaaggaggccgagaagtctcatgatctattctctgaaagctggataaccaagaaagcctatggtatgatttaatctaattaggcccaaggtccaagaaccaggagtgccagtgtccaaaagcaggagaaggtgaatgtttcagctcaagcagagagagtgaattttcccttcctctacctttttgttctttcagcccttcagttgattaaatgatgcccatccatattaggaaaggatatctgttgtactcagttcaccaattcaaatgctattctcttctggaaacaccctcactgatacacacagaaataatgtttatcagttatctgggcatctcttagctcagtcaaattggcacatagaatgaaccagcatgtacacatatagccttctgtgttgctcaatggaatgcctgtgacattaatttcctgggtagaacagaataaagaatatatgtaacagcaatatattcattcaagccttcagtgatcatttgttttacctactgcataccaggtacagtggtgcatgctgagattttgccagtctcacatgtatacagtataatgtattgtctaagttgtaggtgcttacagagtatgatagaaaaagcccattattttgcccatggcaaggagggggtcaaaggaggtttgaataaaataactgccttcataagttataaaggaggagttagaattttccagcagaaaaagtggtgaagagcatttcacttgaaagcagcatggagtacacagacacagaggtgtagaaaagcatggaatgactggagaacaattattttgttattcctagaccaaaggcattattagaaaggctgtatcagagttccaagagggaccagatggtacattcaaatcagcatatattaaagagtatatttacaatgggactgtttacaaagttgtgggctgggtgcagggaaaccacagatgatgttatagtgactgcatgagttactgggatgagtaacggcagagctgtgaccaccccttgacctagggacaaggggaggtagcagttgtgggaacctcaaaggacagaagtgtggagaagagcctgcctttagaggatggtgaccgtcctttgaggaagctagactgaggtgaccttccaggaaggaccaagaggaataaatatcctgaactgttcttccctccttctcatctcctgcctggagtctatcacacaaactcactgaagccaggggggccaggggggccagggaagcttgttggagttcacagaggccagactcctggggtacagagcacagtggagcagagtggggagtgatggggacaggagatacacagcgcagaggctttacagtgacaccattaaaattcagtgggctcaagttctagctaccacttattttctagctgtataaccttggaaaaatgatgtaaccactccacatctccaggtttactcacctgtaaaacagggatagcggcagtatacaagtcagagttgtgggaataaatgagatccatataaagcaattaatacagtgtctggcatacagtgcttagttatgtgctcaatacattgtagccattacttgaaataaaagaatgataaggtgattagatttgttttgaaaagttaagcagttttccgtgttgctacagagattcacaaagatcaagcaaaattataggtaatttttccttaaaacttcataggcacacacacacgtcacttggagctggggagtgattcagcggggacacaaactgggtagagcaatggtaaggactgatgtggggttgccgacctggataggagcaccacgaatttagagaagaaaaggagcttgttttctgcacctctttttatttttattttttgatacccaactctttgttgcatactgcctttttcttccctggaaacttttacctgtctctcattcagctcctataatgaacatccacatttgaacttaacagcgtctttccttttcaattgctagatttacccaacatgaagaaattaaaggacatttccaaaaggctggggataccttctgaagttctctgctgcttatggtcattgttatggtgatttaacttctgatttctctgacacgggcctttttgcccctctttttgtttgggatttgtctgccgtttattgaagactcatttgactttttgtatactgtaccctgtttatccctcactataactctataaggaaggcaatctgatccacgttttattgatgaagaaaatgagtcaagggaaagttaataaaattggagttactattgaataggtgaggtgttcagctctgttcacgtaggtgataaaaatacaggacatgtatctcatgtacatgataaaaatgtatctcatgtttctcatgttgatgatttaatttgctgaatgcttaagtggcagacactgtgatgggataaagaggtaactaacacactgtccttatccacaataagcacacagctcatacctagtggtgtcatgcttgctagaaacaaaaagtgtggtgagataaattaatttgttctgaaaatgaaattaaaacaacacattttgttaaccctctccaaaaaaaaatccgaacagaaaagccttcatgtttgataagcttttagcttctaagtattgtatctcaatatcaaccagcagatatataggattactaagtttaaagatctaaaatgtataatgtgaggactggagttaataaaattgtattgtattagggatttttttaaggaagtagactttagctgctcttgtcatacacaagaaataaccatgtgagatgatatgttaatttggttcacttagtaaccatttcactatctatatatattctataacatcatgctataaacttcaaatgcacacaataaaattatttttttttaaatctcagtattaaacactgagatttaagattggtgacacccatggcagaagatgtgtgcacagtttggttgagtgacgatgtgatgctgcacatcttgagttgacttgtgtcacttgatttaagaaaggaaggagaaaactttttttgtaaatgagagctgaagtggaacagacttctggatttgactttctcatgaatggattcccgtgagatatgagatagtacagctcacttccctcaaaaagatttatcctcctttactattgccctttggtgtttgtacgagtcaggagagatatggtaagaacttttatttcaaatggtctaagttctgtgttcactgtcattgaggggtaaaatctgtctctctctctggccagtggggttctgtgtctgaaatattgtattgcttttgttgtcttttgtttgtttgattcttgaatctctacccctttacctacataactgactcagtagttgcccaaagaaacttgtcacctgttgccattgcatcttctatgaagaatccatcctttgtttacttgcttggtcaaaggaggggagtcttgcatcctagctagtcactcatttacacactcactgctgcaagaaatccattcaacctcctctacagttggtgggggtgtcttttacttataaaacacaggatttttttgtgtacgtgcctttgaaaaagaatagtgcccttttccatttttttgcctgacaaacacctctcctctcttgagatgctgttccaatacagcaccatctctgatctgagattttgtctcgttcaacctataaagcgaatttctagtttcatctcttctttatagcattgtattataatctatctgtttacttctccccactggactttcaaaggcatgacttgctcatttttgcacctccaatacatagcccagtacttggtatttggtggatatccagtaactgtttattggatgaacggatgaatatatcactgagtagtaggaaacagggagccatcaccaggatgtattacaccagtattcgaaatagataagctaagcagtgggaggtatatgaatttgtggggagaaaagtaggaatcacatgggtcggacggaaggctttttcaataattcagacttagatttgggttgtggttgacaaaacagggataaagaggtcaaaatgaatcgtgttggagggatataacttgagcagacatttgttttgaaggtgaagttgaggcagctatcagtcagacattccaagcctgggtcagtggagacatggtggctcgattgataagacaggctgtttgagaagggaagcttgtgagaagatgttgtgaatttggctttggccatattgattttgaattaaagaacaggtttattatgacttggtgaagggaagagaaaagaatttgcatgcctattaaatattgctgctatttattagttacctatttcataggatagctattgttgccctcattttgtgggtgctcagagtgaatctcagtgaagttatatgccttacccaaggtcacagaaagacagaattaaaacccagggctctcagagtcaaagacttgcatttttccattctaccataacattcttctaggctgaatggatcacttcactatttagtatctgaactctgtgcattattggccccagtgccttctctcatgttttctctttcttagcattattttcctttttccttgaacctccttaagttgcctttgtcttttatagtgccagcaaatttgtaccttctggaggcttttcaagattgtttcagagtgagactccatctcaaaaaaaaaaattttcttgccccacccatactcagcctttgactcttttagtgtttaatagtttgattaattgttaagttgtggtcataaatattaagattatggagtttaatataagtcctaaaaagcttagtatttgaatataatagaaatggtagatgcacctaatggggaactttcaaacctgcacatttgtattctttttccaaagcagggatctgtcctttccttacagaatgaaaaaaaaaaaaagaaaaaaaaaaaaaaagtcttgaatgtcctagtgttctagtgtttgcataattgcttttcatccctgctctctgctaattgcttttaaggatctctgctacatcctgcatttcccatcattgttggattttattgacttctcttagaaagccagcctgatatataaaattctattatcttgggacctttgcctgtgatgctgttatgcttttagggaagacagtggttggttccatgaaaatggacctgtctggaatacactggaatttcataatctatccagaaaaagataaagcccagatgataaataccagaaccttttgctcctgtctctttggcgaaaacaagtggtgtttggcttgctctggtgaaggggtcatgggctgtcacagaattcgaaaaagatattttgatattcaggccgggcacagtggctcacgcctgtaatcccagcactttgggcggccaaggcgggtggatcacgaggtcaagagattgagaccatcctggccaacatggtgaaaccctgtctctactgaaaatacaaaaattagctggacatggtggcacacacctgtaatctcagctacttgggaggctgaggcaggagaatcgcttgaacccaggaggcggaggttgcattgagccaagatcacaccactgtactccagcttggcgatagagcgaggctccatctcaaaaaaaaaaaaaaaaaaaaaagatattttcatattcaagtaataatatattttggaaatctaattttctcagttttgtatccaaatatcatgaagtcaagccagtctactctgttctgtgatgtggaaaatctctgctgtgtaattctcaaccatgactcttggggaaggtttctttgtactgtggtataatgcatgtgatttggctcacacttctggaatacctgctgtattctcagtgctgggcaagtgctgatgggataccacatctgacttaatgagcttttgttttatgtcctgttgcttgaacaagtagactacaagccctcaacacctcctatagacaaagaaaaacaatctaccatttattgagcatttacaacacacattatttaatataaatcttccatcaattctatgagttagttaccattattactccattttatagatgaagacagtcagaaaggagaagaataatttccccaaagacctacaactagtgaagacctgagccagattataacccagttcacctggctccaaaaccaagacttttgattgatgtgccataaatgcaggggctggcagagaaatggataagcactagaaagtatagacctaccatgttgtatctgtgttatcagccccttctttacttagcaatgtttattagcctttcactatgctctttctgaaataaagctgattttgtttatgtcagaacactatgaccttagctttttgacctaggctcacagtaatatttgctcaatgatcataattcattgtgatttacgtcttaagaatataaggaacacctgagatctttgtgccaaattcagaaggaatagagtggttttgttttcttctttgcttttttcttcctcatcttccttcattctgactgtagtccatccttggtttcaattcatggcaagttcacagaacctagcaataggttaaggaaaggaaacttctcagccaaatacatctctagtatcaaaatctccaaatagtggctggaaaggattgttctctaaaatgagttctgtctttagaatattttaatctattttatgtcacaaatatgtattaagtgcttgttatgttgagggtgctaggtgcagtgaagaataccaagctaagtgaagtgaactttgccttgaagaatgataaggtgcattgccttctttctcaaaacttatgtggttctccagacagctggaggatataataaaacacaaattgctaaggcctatctcctgagttttgattccagaggtttgggttggaggtctatagttcgaacttctaacatgttcccaggtgatgctgatgctgctgtacataatacaattatgagagtcttttatctactgggagaaggtcagttctcacctctgagccagtatgatggagaaggatggaatgctaaaaccattcttgaacaacaaggtagtcttatgcaaagactatgatggccatgtgattaagcgttgtgaaaattaccagtagaacatagatcaatgcttttaaaatatgctttgcaatatgttaaatatgtgtatcaatatgaaagtatatactacagagaataatatgcctaagtacaacatccacagaatattttcatgttggattaagcttcctggctttgagttagggttgatgtcaattgatccttaagtagtgtgtaaaactttgtcaagaaatcatcatttaatgtgttgggacccattgaaagtgatattgggccgggcgtggtggctcatgcctgtaattccagcactttgggaggctgaggcaggtggatcacctgaagttgggagtttgagaccagtctgaccaacatagcgaaaccctgtctctactaaaaatacaaaaaattagccaggtgtggtgatgggtgcctgtaatcccagctactcaagaatgggtgcctgtaatcccagctactcaagaggccgaggcaggagaatcgcttgagcttgaacctggaaggcagaggttgcagtgagccaagattatgccactgcataccagcctgcgcgacacagaaaaactccatctcagaaacaaacaaacaaacaaaaaacaagtgatctccagtgtttgcctggggaagacctgattatttgaaacaatccggagtttcttaatcacttgagaatgcctacataatattttagacagatcaaaacatatcatggaccagaagatctcaaggaaagaaacgtaatttgaactagaacctgactgtattgtatggctctcctcaacaatgtggtttttcaccttattgttttaagagcttcattggttgaatttgtgctgatttcactagttgtttggtattgatctatgacatgtaaagcacctggcccagttctagccacacatttggcatcaaatagatgttctctgcctgaaagatgtgagcagaagacctaagagaagtatttgaggtagaattattattccaagtttctgattcatacaatttactctttcttccgtttttttttttttttttttttttgtctctgtcttcctgctatataatagcccattttgtttaattttccgtaggaaagaatagaagatttttgtcagtctcaaatcaagtatctggtattcggttttcttttggtagcttctcccgaaagcctgttaaagcttctcaataacttgtattgaaatagatgttttatatttcacggtgttctcattaagctgatggagtactttcactcacagcttagaatggagtggcaggacaattacctacactagtcttacattttactgtggttatcatataagaaaagaaatccttcaaataatttgtcctttttgaaaaattggctgtccattttaagttctcctacattgtctgaagaacataaaaaattatgcgatcatgctcttcctcattgttggttttgttgtgctcaggagccttgaacttgggcaagtaaaaaaaccacagttgaactcaatctgttctacaatggaggatgtgcttagtatggcatgggaaactgtttcagaaggctctgctcggttacttttgcagcgttgttataggctgatacagcaaatcccaagacttggtaaatatccttcctgaacaaacacaattttaaataccactcataaatgtaacataaaattatttcatgattatgtattttagtttctaataattgtcaagttctttctctggtacagtgtgaactacagtgttctttcatggcacagtgccagttattatttttggatctctgaactcattgatacaagccctttacaatttcccttacgcttcttgagtttgggtgttgatttgataatgacccagtgattaaacaaaatcatcataaggagacaaagataaggaacaattttcactaaatggaagtatttatgtcattacctactctctaaataaggttacaaatactagacaaaggaggtacacctgtgaattacaacataaagagcttctgaattgaagagttacttcgttgacatttgtcatctatttgtcaagataaatttaaaaaaaaatttgtgacaaaaactggaagaataacctattgctgttttggaagtaatttgttctatttgtagatagctgctgctgattgtttctttgcatgtccattgagttttaaaatctatttcactttgacttcaaatttagtttttttaatagcaatttttcatttcatttaggaacattaaaaattgtatgcagccttttgaaattttttaatcatgcaatgtcattttcttgctttgcttttttttttctcaaataaagccatctgtttagtaaacatggaaaatggattgatatgcaacccaaaaagttcataatgacaactaaataacagatgacagattagataagaagaagtcattaagttggcctataaaaggacagccatctgtaccactaaaacaatcttccaattgatggcagtaataattttctgagtccatgacagctaagaattgctagaataaaatggaaagcttgtaaatcgagaagtggaacttaattttgggtaattagcctaactattttgttccagtgttacatgacgagtggaggttacaacaaaatcctttgagaacaaaaaacatttattctgtgtatgcatgtgtgttttatctgacacacaaaatgactaatttacccttcttttgtttgactgaattatttaaaaatgtagagagtctaaatcattgaggattaaaaagatttatgttttaggattctttaaagttctagtttacagataactgattgataactaaaacataaatttactggaaatgtttaaggataagtagtcacagactcccggagtgaaaaggtccataggactaactgccctggcttagccagtcctgtcctcaaagtcaagtccaattttatgatccctaacaaaatactaaagaataacaagaataaagtatactactgattccctaagataatggtttatatttagtagagttaagcagaatcagccatcagatattaccaattggaccggcgtactttgagagaagccatatttggtgacatttaaaaataagattgaattagttggctttgatatagaattgttttttatattcactctcagcagtgagctaatcctctcaataacactaaaatatttgaacctttgctttttaacacggacttattattagaattaaatttgggaaaggtgacttaactggcattgaattcttgttctgataactactctgtatctgtttcttcagactgggttggcttggggctttttcgagaatcatcttatatcagaacctaaggagatactaaactgagtctgtttttagcagggtataggaatgtatgccttcaaatcctatgccttggattttcatttttacaaatctgatgggccacatatatgggttggaaaagtttaaaataaggataggaataataaagtaagtcactaatcagtctgcctttcacaggtaatgactaatactattaatgtgcatacttttttactatgagtttatgtatgctttaaaaataaaataattgtattttaaacaattttggtgccatttttcatttaatatgttacaagcatgtcatatgtcataaaaattaattatagcataggagtctattgtatcacataccattttttatattgccacttttttatcgtgagacatttggattctccagcccatcatcgtgatagaaaaatcctactacataagtctctggccatctcttcttgtttccttagagttctaagaagtagaatagataggataaatatataaaatttgttaaggttttggggtcatattaccaaatttctctctaaaaaagctatcagctgaacaggactgtatgaatgtcaacttctttacacacttcttataaatttttaaaaattactgcaattttgaaagtgtgtctgtctcattttaacttgatttttgcttgagattgacttttttacagatttgtttttcagccactcaaatacttctgggaattggctattctgtatcatttctaaagagttggctttatttaatgttattaatttgtaactttttctaacaaaagctctatgtttgcatagatgtttaaaaaaataaaaaatctcacttttttgtttgattaaggctactatgccaagcagtattcatgcttaatttgttgtctaaattgattagacaaagaagagtaattcaggtttagactcaccagcagaaggagatgtagggaacacctggtactgaggttcaggttctgtgtgccctgagggaaggtaagaaattccctttggcagttttcactcttaagcctttttagtagaccctctactgggcagagcacttgatatgtagtatactttgtatagtgcataataatcacctaagcagttaaacttttaccaaccaggcctgggcatcttacagaaaaagagaagcagcaccccactttttttaatgttttagggccgatggaagaggtagttagagaagcagtggaggattcagcttcatggtaaatgggtctgaatttttggctttcagaaggaattaggttaagtctgaagaaggggtcatagttgaagttggtaaaataatattaagatcaccttgaaatttttttaggaaaaatgatttcaaatttatcttgttaaactgttgaaataaatgttaagaactgatctccaaacaaatcaattgatcaactgaaagtgaatgccatccagtgagccacctgttttgctttaaggaattgatctccaagggaggtataaatgtaggactgaatcccccacactgagaatgcgaggccactctgaccagagggagctcctaggtaagagctcccctatttcctggcacctgacaaaactgggtaagtaggactctgataagaaatgcttttaggtcaggtatggtgcattgagcctgtaaacccagtgacctgtgaggctgaggttgggaggatcacttgaagctaggagtttgagatcagcctaggcaacatagcaagacccttcctctaaaagtatgaataaaaattttaaaaaattacctgactgtggtggtggacaactgcaatctcagctactcagtagcctgaggccggaggatcacatgaacctaggagttgaaggctgcggtaagctgtcattgcaccactgtactttagcctgaatgacagagtaagactccatctcttaaaaaaaaattttaaaaaagaaatgcttttagaaaaagcatagctttttgtattaaatatgagttaatatacacatgctgcttgaagcaagatatgaaagaatttgacatctgggtatagtgagtacctgtgatatttctttcaattttaacatgtgttgagttgtacaattcttagtttcgtattgttttgtatgaatcttttacctttaaaggaacctgttttaggctcaccactgacagactgagtgcttaaaatctcctagcatatttttgtctgcatcatccaagcttattgttgcctcataattaagttgcttctcttggctcttatgcagcctctagtaaaataactcacttattttctctgcacttagtatttattgagggccttctatgagcaaggcatgctcctcagtgctggaaatacaaaaatgagagccatggtttcttatcttaagtagcaattaattactccagtggataagacagtcaccggaagagctaattacgatacagggcaagaagtgaaatgatggagattgcacaggatgttagcaagctataaggaggaacaaacttatcaaagaaggcttcttcagggtaagagctagctaattaaatctttagagggcacaggggttagccaggtctaggactgagaaggaagggcatggtttctgcatgggtctataagtgattttgttgtgttaggaaataagatatgagcagagaatgacaaagatgactgactggtttccttgcgagctgagtactagactattagattctctagattttcacaaggccccagggcaagtagtaataggaggattctataggaatgtttatcttgctttcctcaccacatcatggtggtgtttgcagcattttacaggtattatcagttagctcatcctttgcttttatctgtagtgatagcaaatttttatgatgcaacttagaagtattacaggtaataactccttcaccatagtctccatttccctgaccctgctcttgactacctctgttgcatatatcattagacaaaattataagtcaaaggaagaaaatgtgcctttctcattttctgcatataaagttacaccagacctctctttccactatgcccatcaactgtagaactcaaggtattgggctgctgtgagatgaggtggcttgcgtctgagtgtaattcaatgtattgcttccttcattgagaaagtactattacaaaaaataaatatcagtcaaactaaacaatgtgcctagtgatacagttaattaacattaaggggtaggccccttgtattagtttgctgtcgctatataacaaattactccaaatttagtggtgctaagataacacacctttattatctcatagttcatgtgagtcagaagttcagacatgggttaatggcttttttttgcttcagtgtcctaccaggctgcaatatagcttttggctggggctgtggtctcatcagctgcttgactgggaagggatctacttccaagctccctcaggttgttgacagacttcgtttctttgtggctgtaggattcatgacagtttgcttcttcaaagccaacaagggagagagactctcgagtgagtttgctagcaagatggagttttacataacataatcatagcagtaacattctatcatctttgcatttcttttggttggaagcaaatcactgacactgttcacactcaagagaggagattacacacaagagcatgaatacagggggctggatcatggagtttacctgttcatcacgcttatcttagaccaaaaaagaaaaaaataggttttggagtggcaatattccatagccatactttaagtagcactgttggtggaatacagggaggaaggagggagaagaaatgggaggaagtcacctcttacttgtttttagcttcctggaccaggaacaaaggtgacatcatctttgggaaagcacaaatgcttaaacatgtgtcttatttgttctacataatggttttaaaaattgtgacgttacgtacaattttggagataatatgtagaaattgctatttgtggttccatttaatatgtatatataaaatcatgggagtttggagctctacccttctacatggcaaatattggttagagattagtagctgaaacccacttttagttgggatatgggcttgccagttcagtgccatctccactactcagaagccaagtacacatgtacactattaccaagttttccctgcttgcttactatacctgccctggcttcttcaggcatctgagttgggagtctccaggaccctcagttccccagttgcaactgacattattattttaactgtggtgcttgatcctttcactcctgatgtaggtatgggagtgtgtactgtaataatctgttaattttatttctgcagaacctagtcattacttacagcatttctggtgagtggctcctacaccaataccaattctcttctattgttttatcaaactaatgatctccactgccttaattttagctgttccagccagatagacaagagaatgaatcaggaaattctaactgcttgagaaaacagatgtcaacataactaggttttaccctcatggagttgacagtctggaaggggctatgtgatgttagttataaatatgataatcatatatgatttacggtaagttaccttatgagttcagcaatggaactggctttccaacatttttaaaattgtgatttctttagaaaattttgtccaagttgtgtaaaatttaaaaggaaatattgatctttgaattgctttttctcaggaagctatgtttgctgaagtccttatatatacgtttattaataaacagtttatctttggaggcttgtatatttttggagtttagtaccttctgaaaaacttagacttacaatgaatcttttggaatatgtttgcttatcaattatatatttaaaaaatagagagtaaactccttaattgtagggattggtctgattattaccttttaggcaaaatagcaagcattccagaaaacatctggaaatccaaattgtttatattcgtccacgtggtaagcattaagacataatagttttaatttcttttatgtaatgcactatgtgtctgtccttctcacaaaatccgtaaacagcttgaaatcatggaatcttctcagtacctagaacagaggttgacacttggtggcttgtgagctgaattcagcagtagatgtattgttgagtaagcttccagcacttcaaaattcagactgtgcatacaaatttaattttgtcttttctcttttaaaaaatagaaaatgaataattttttattagttactttaataaaacccagtactactttgattttatgcaacctgatgttctatttggagaataatcttactgcaaagtacaaagcttatatgtgaatctgttggatgtcaagtagtgccatactacacatgtttatttctcttatacctacaatcagctggggtcacctaggcaaatgtgctgaggttggctaagttcaatcacatgtcagggttagctggctgggcaatgatctaggctgttcttggctgaatgacttagctccgctctaaatattttgtatccgccagcaggctatccctggcatgttctaatgctgatggcaaataggaagagcacaaagagaaatacacaaagccttttcaagtctctttccaagtccatttgctgatatcacattggccaagtcaagttacatggctaagccaagcatccaaaggtgagtcaggatgcagagtgggaagacattgcaaattacatggggccatttttgctctctgccacaagagctgtggtctaggtgcctgtgacttattgccaagtcccaggtatacttacacatgtgtgtgtcttaccttgtatttcttagaattataaatctaagctctttcaaaaaaggaaagttaataaataaatggcaatctctattcctttagtggtttttattttgttctacatgttaattttctttgtgaaaaaaaaacccaaaaataaaatccttagttttaatataaactctatgatcttggttaaaaaaaatttgacactgctatttgtgaaaagatttcaacattattgaacatatatacaagctgtttattattttgcttacaggtggaaatactgggtttaaaaattgataaagcagcaataattaacaacctaatctaaaaactctcctttgctaagtaattgcttttttcattcatttattcatccattgatttgttaaacaaacatttgtcaattcttaggtgtggttagataattacaaatagacacaattttttttttcagtatactttttgcccttacaggattattcatgttactaatttaccatgaatttctttttaaaatgaaagggtaggccaggtgtggtggctcacacctgtaatcccagaactttgggaggctaaggagggtggatcaactgaggtgaggagtttgagaccagcctggccaacatggtgaaacctcgtctttagtaaaaatgcaaaaattagccgggcatggtggtgggcgcctgtaatcccagctacttgggaggctgaggcaggagaatcgcttgaacccaggagggggaggttgcagtgagccaagatcgtgctattgcactccagcctgggcaacaagagcgagactttgtctcaaaaaaaaatgaaaagataggcatgcttggggtttggggcaaataacacaaaagtgtgtacaaaacaaaacaaaacaaaaaacaaacccccccccccccccaaaccagtggtgatctgaagacaggattgaatgttttcaattttgcttccaagtggagaatcatctcggggctgtagaatgaattttccttcttaagacacattttcctgtacctacaggcgtttgcatctacaataactattgatgtgagagtgttacagttttgttttagtaaattgcatgagtaatcgtccccccagcacttgctaagttgatgcttccttttttaatggctgtaatgtatttgtaaacatgtctcttaacttacttgaaaacatgttggttccatctcatttatttgcagacaacttactgtctgttgaaacttcagcttcttttattctaatgactcctttgaaatattattttaatgaacctatgaaacacatcattgtattctttatattgtggttggactgctaatgagactcatccattaagtaaatggctttgtagacaatgcaaatgtaataactaaagttagtctattcttctttactacttttctgctgataggcataccacataccgagaaggtaatgtttcacgaccaaaacagttcagttggtaggcagattgggaatctttgcattggaaaaaaaaattcaagaatatcataaaagtatatttgcaactccatctattttttatcaaatcataagataatatatttcccatgtaagcattatatttctagatgatacgcctgatagaagaaattaagtgtccatatgatctacaggaaaaaatctttaaggtaataaattttaaaaatctattttaaaacataaaatttctaagaaagcaacatccataaaatggattgctacagaaacctaaattcaggtccttttcatattgacttcattatggacttgaatttttctgccttaataaaaggatgtaggtctcaaaactcatcttgcacatcttgttttaatgcaatttagttgcaactgttgcagagctttgttccttagttcagctaaaactgggttcttgtcacaccaccaggaaaagttaggcatggagacagtttgaaggatgaggggaatggaatttatttggcgaaaaggaaaaaagaaaacaaactctcagcaaagcgtgggggattcctgctaacaggtcctcatctcatagatcgattccaggccacacagatgagctgaagagcacaggctcctcccctgggtaaggtgcaaattccctgtggctccacccacttccctcagtgcacatatctggctccagtctgctttgggcatgtccagttgacaagagctgtcattattagcattatttattttcacatttataattgaatggttttataggcttgtgacttcagatcagtgaaaacagaaagatatccttaccatgttgttatttttccactactcttataggtagcaaaagctggctaagctggtagaatttctaggtttccaatgctgtaaagagcactagcctctctaataataaaaatattaattgatggacattgcgtgaggactctctaaggagtcactgtgtatttgggcgcagacatgggcaaatgttggcagggaacacactctgcttccctagccaggactttctctattacgttaaaccagttgcccttgggattgatggtggaaatgaaatcttaaaaggaagaatagataagaccaagctttgcagagcaacaaaggtgaaaaactatccttagttgtggaagtgattttcctatcaataaattaccaatgcatcttcaagtaagaaatgttagcttaaatacaaattaatagaatgcatctgtgtgtatatacaaatatgttagtaactgtgaaaccaggtgtttcttataattgatagcatgtcatagttttcaaaaagacattttctttcttaaagtgcataaaataatggtaggtcttactactgatgtcattcaagattcaataaactgttgtaatttaggaatttagcactgtgttcctattaaaaggtccataatggaaggtaaagatggtgtttctatcttgagacgatagtctactttcatgattttgacaatggaaacaatgccatcttttagtcacaaactggatttggtagatcattctaggttctcgttctagtctacaattggttttctgaaatctaataatttatccattctctgtgagcttgaaaagcaaggagagtatccacataggtccaagccatcatgaatacttagttctcctcctagttgaacagtgtgattgtaggtatttaacaatagcaggaattggtaaagaagcttattcctggctatgagattccttgacagtaagctgtagaccaggaaggtcagtagttctcatgctgtctctaattgatgagttagtgttacctggtgtgctgtgttggaactcactgtgaggccctgcccagcttcaacagggacctgtagtaagatccaggggaatacttgtcatggacacgtactggatgtccctaataggaggacaacatatatcatctctgttgtacacacttagtaatttgttcattaccagtatgacacaaatgatttaaaatttgtgaagtatggggaaaagggattaggatgttcctaatcttaaataaagcatatgattttcataaagtttactttaaagcaatttatagtgtttatacaaagggaaatttgctaatgacattgccttaagtaacatctgggatttgttttgaaatagttttgtgagtgatagtggaggtataaatgattcattatatcattctatgtctttgaaattttttatgataaaaagaaaaaatcttaaaatgtagacttttatgatatcttggctaataaaattctttgaagtgggtgatggactgatttgataccagtttccaaagagtgttagaatacagttttcgtgtggcttatttttcaattagaaaaaaaaatcttgaaagatacttataaatctagctttattaactttcctgacaaaccctaaaagtcaacacgttatcttctaacaagtttggaggcgtctctaaaatacagcctgtagctatttatgtagtttctcctcactgttcctcctccagtgtttgccttttatggcctcaagagagagcataatctgaaataatttctaggatgcaaacacattgctgaagatatgggctcatggaatgtgttctctgtagtactgacacgagtgacttttctcaatctgtttccaacatgaggcaagaatcttcagttgaaatatggagaaaatagatacaaaatacaagtatttctatgcattagctgcctaatgttcactcttctagattgctattcatattctctttgttggacgcatctcagtctgctccctgagttgtccctagttgtcatcaaacaaaaacagcaatattgaaaacagtaaaaatgtaaatgcaagacagagaatggagaagtattagctgtttccaatcaaatgctacccatcagtaaaatatagaaaatacacttcactgaagacctttttgaaataatgattaattactttttaaaggaattattctagagatatgctaagctactcagcagtaatttaaagttggcaacctgttaacagatccccgtctgttccactgaggtcggccagcttctgttggataactgtagtcatagagtttgaaagcaaagtgcaaaatgccatccttaaaattggagctgttgcattaaattatgtcacatttgatgacaggtcacaagagaaagtgatacatgatttttacaacatgagccaccaaaagcatgcttcatggaattctagtagtccaccactgttgggaaagaagttagtttctgtcaaaaattaagacagtccagggcttttaaaggagaagtaaagacagaaagggatggtttaatctcttgttgtggacaggtgtatccacagtgcatcagaatgtgggtggaggaaagaggtattctactatagatagtgatattagtcttaccaatttaaaattgcagcctagactatcatcttaaaaatgaaacattattaattaggtttcaaagggcatgatggcaaagcgtagtggaaaatttggggtggtattagtagcatatctggggaaagtggtgttaggaatatttaatacaccacctttcctcatctttaatacaccacctttcttcatcatacctacatagacttggtacaggtaaaaatctaatcaaacaacggagtgaatagatatgagctatacttaaatagctggacctcttccttttgattgcctgctgcctccctatagttctatcttagagactgctagggagtgttttaatcaggcttttgattagataagtccattgcttcattcctctgccctgtctcttcccccattccctacacttgcagaattgcaggcagctttcagaatctcagtagattctacaaagtagaaatctcctccaaaatattagtattggtctactaggcaccctcacacagggcaatttatgttgacttattctgtagtttttttagtatattgatttacattttgaaagaatgtatagaaggtataattcattattaaaaaccaggatatgcaaaaagaagatccctggggtgtaactatcagttgttattgtaaacaaatcgctatagactctaattttttatttagaggacatcagtcctgtcttcatgtgagaagacaatatggctgagtttactaatataatttctgtgccaaaattagctgtggattagagtgatgacaaattccttgggaaggttggatgagagatcctctatgatagaacttgcttaaaaagccagtaaatgtgagcagatttccaatttttgctccaatacttttaccttctgcatttgtaatcactctttataattctcaactttcagtatctccagacaatatttttccttccattgagtcttagttaaacatcttacttctctttcaaagccaaaatcttgttgggctcaaagttttttctctttctgtgttccatgttgcttttaagtcttcatgctttacttgagggaatgggccaactcatagttttacagaattatgtaaatcatcttgctgttgatcagaagagaagaatattcaatctattaaaagcttcacaataatgtgaatgtatttaaagacacaaactgtatatttaaacattaaaatggtaaattttatgttaaataggttttatcacagtaatctttttaaaatcagaatttggtgtccaaacacaaaacattcataaacctaggatgagaatctcagaccctgtgttatatctgccacactatggaacctagcagtctattcagtgacttttaaatcctattgagtgatcagctgcctgatatgctatgcaaagagctctctctgctccttaaacattgctcatgcaattgtgtattcaataactacttactgatagatgcaggatgcagataaaaggagggtcctggagaatctctgacccaccctcacattattgggagaacagggtgaagccaggggaagttcacctcctgtgcagtggggaggagcctggcatcttcaggtcctgtgtatggcttggaattcaatgtgtgaggtgatggcctgttagcaggatcccctcttgctttgctgagagttttttttcttttttctttttcacccaataaattccaattcccttacccttcaatgtgtccacgtttctaatcctcgctggtcatgtgacaagaacctcgttttggctgaactaaggaacaaaattctgcaagattactaagacccatgccacgtacagggttctgacccaggcggtgcgaatatttccctggtagccttacacacagcctttggttacctcgcactaaaatacccatgaagacacaaaaagaaaaaagaaattcactgtaacatctgttaagttggaagtcaatctaagtgtagaatttgggaaagactgttgctaattataaagcagagagactacatagaggcatcttctcagagataagcatatagcatttcctaccttcagtctattaaaaaaaaaatcaagagggagagcaggaaaaagcaaccaatggtgtgttaccttcaaggcatggatcccaacagagtttagaacgcagtaaaaagattttctacaagtaattatgatttgtgatagaaacacagttttcgcattcaatcctgcctttgtctccacgtgggcctggttctccaggcttctgtagagtttgtgtatctatgggttttaaatgcagtgcttatttgaacagattttaatttctcagtttttatttactcaatttttaaactgtactggttatttaaccctttaaaattataaattcaacatattattacaaaataatacatgcaacgatgaggcttaatataggtataccttacaaactaaagtgctgtgtggatatatccagctcaaaacaacacacccccacggtggaatgagaacgcagtcatccttctgtgtactcaaggatatactcatcgtataacaaaatccgtgaatactcaagtcccgcatttggctctgtggatctgcagataccaaaagtcagccatccaaatatggaggtatcatattccccaatgctatactattaatccatgtttcatttaaaaaaaattctcatataggccgggtgcagtggctcacacctgtaatccagcactttgggaggctgagatgggcgcatcacaaggtcaggagttagagaccagcctggcctacatagtgaaaccccatctctactaaaaatacaaaaattagccaggcatggtcccagatatttggtaggctgaggcaagagaatcacttgaacctgggaggcaaaggttgtggtgagccaagatgacgccactgcactgcagcctgggcaacagagtgagactctgtctcaaaaaaagaaaaaagtcctcctcatataagtggacactcacagttaaaacctgtgttgttcaagggtcaactgtatattctcaataattaattatcctgcagcccatcgtcttgcatattctgacatgttgcttaaaatgttctcaagtgattacatttgtgtatatttaatctttctaaccatatagttacttgtctgaagttcaagtcctcccttgatttgtatctgttcagagcagctagtcaagtcttttgcatctgaagggcatggatggtggaagggctgcagtggattaccattgtctgccatgggctcccaagaacagtgatcagaggcaatgtaccacttacttctaattcggttgtaggagataatacatgtatgttgattatgggaagagtcaccaaagaaagccatatgtttttcttctcgcttcctatttatataaaaatgtgaccttaccttcaacttcatttgcagatgtctgttcttgaaatttatttcctaaagtttttagtaatgattttcaattacttaaggctgctgcattaaaatacagcaatcatatcactgtttctgtaataagtcctttattgccttaattgctaatggtggaacaactgagttcagagaagaaaacttaaaaaaaattaaacacccctccataaaattttgaggcagaagaacctgtgccagagcataatttgacatgtttgcatttaaaatcaaaccagaggtgtcaaaacccatctgtttagttaggtcttccagtgagtgattggcaactttcagaatctcctcttttggaaataaagattctaagcctttaaaaaaaaatctcaaagtctgcaatggttcaggagaacattaaaaatgagcgtgcatagcaacaaggtgagaacatggcccaccgtgttgtctgtggatgatttacacatggtgcccaggaacaccagagcttgagttggtttctgtgcacacatctgttccgaagcacgatgtagttaatttcagtcactagtgttttgattcacagctgttacaaaatagggattccacttttgtcatgttggctacaaatatttccttctggcagatgggattcttctttctgaggcaggaaataaaattctagagggtaaatgagaataagtaaggagcttgggtaaactgatcggctcgcgtccctctgacacgtacttgaggtgttgagagccaactgtcaacagaacgcctatgtgtgctgagcaaagtgtgagcatagaattccaagaagttactgctgcctggtaagttaattttcttatcttccatgggtgtgttaggtgagaattagaaataagagtattacttttagacgtggtctttgtttcagatatggattcagatatggactagaaatatagtgtgctggctcaaaatgaatctctctttaatactgaagaggtttaggaaagttagtttacttttggatcctgagatccaaatcaagaaagaaaaaaaaggaaagaaaaattgacatccaaagaaaatatttgaagatcaaagagcaaaaatcactcattttatatataaacacacatatgcatatgtgcatacatacttacatattgcatatattatagcaatagatatcataaaattatatgtgtatattcataaatacataacagaaatagcaaatgtaaagttttacaaactatatgccagatggtatcttctgtgggtcccctcctttacactaagtctgtaaaggaggccttgttatgtctatttcagggttaaggaaactgaggtcatgcagctattaagtagtgcgctgaggtttgaggcaggcccatctgattctttccattccccagcctcttttctctttaattctgagggaaggcttaatttgcagttggtgttttgcgtatcagttggtaatttatgtgctctaataaataaataggcagtttattccccatcacagtaccaccattatgtgccatggtcttctgtattcactggtgctgttcagatatgtcataccatgcagaaaaccacatgtgctctatctttctcaggcaacatctaagtggtctagtaactgcaagtctttatgtggtaaccatgctttttgaactcttttttggaaggcagcatgtgataaaggatttctatcaattctaggtataagaaacaatctgacatatatactatggatgtaaataaaatactgggaccagacatagacatggtggcgcatgcctataatcacagaactttgagaagccaaggcctggtggagatcatgccgctgcactcgagtctgggcgccacagtgagaccctgtctcaaataaataagtaaataaataaataggatctctaaataattagatgatttacaggaatagagtttttgtggtatagatgattgtgaaaaatcaggtatatatgctttatcatacactgttatagcattggacaggtcttcgggctagtagcgattaatgggaaagctatagtcttaaagtggaatgtggtggaatttgagcaatttcttctgattaatcttagtgatgcagaatatatgtatgcttccctttatggaagattctctagaaaacgcattccatcctgtcccctgctgcatctcaggtatgacacttctctcaaggtctctacataaatgggaaaaaaaattcgaaaagaaacattatttgaaaaattaccttacaaatggaaacttgggtgttcgatttttcgaactggtaaaaatgcccaggcttgatagtaatgtgtgactgtgtattccaggatacacttcggtgcccatacaaagtacttcctgagtttgattgtacccagtgaccaggaatgcaaactgttttctttatgggattttcagacattccagtcccccaagagtctttctctgccatctctgggctttatggaaaccccaggtacacctgtatgtcatgtggtttcccagaagcctttagtgtgtctgtcttatttcagtactctctcccaggatcataactcagtttatcaaagcaactcagtgcagtggggtgtacgagacagcacggctaacttgtccaccatgaaagcctctgagggatatgagtggtctgtggtatttttgccataggtttatggttttgtcacttaagttatgcttatttgtatgtgtcatgacaaaacataacatgtatttcaaaattagtaattagcagcaaaggaagaatgattgcatcattaagcatccctttaattagaaatggtgtgtaccaagaattattcaggcattacttcatttaaattttagagatgaggagacagtcagaacacatgcttacatagctagaaagtagtaaagccacgaaaccgagtttttcagattccagaagcaggcttttaaccattatttaactgttttaactccctgatagaacttcatgtcttcctagtgggcggaaaaaaaaaatagagaaggcacaccttgcgatttttcttacctttcgataaaaaagtatgcattccctaatgtagagcagcataatttatcacattaaggaaagaattgttgtctcaattgtgaacttagcccaagaataaatgttgccaagcttacctccgtcttgtagaaaagcaaaaccataattcatcagtaatgaattttggtctgtgttgtagtttgtgtgtggtcgtggcaagtacgtaaccagtatatataaatgaaatttctgtccactgattttattttctctctgtctacatcttcaagcataacagatacactcatcaaactgacaaagaacttttttttttttttttgcttactttgacataatgcaactgcagtgagtttttttaaatagtcttagtctgcattctagtcacatgccttcctctgccctatttgcttctctctttaagttttctgaattgctaacttactgtatgttattatctaattcaatgctgtctaacggaactttctgcagtgctggaaatgttctccactgttctgtctactatgccagtagccacatgtggtcatggacaatgaggacctgaatttccaatttttattaactaaagttttgttaatttaaatagccatgtgtggctggtggctaccatattggatagcacagatctatttagattttggcagctgaggtgattcttgagcacaaaatgtgataaatgagatcttgaaatttataagggaactttaaactattttcaagttccaaaatttgggctatgttcaagtgttctagaataaagccattctttaacagctgacttttaaccactcttttcataggcattcaagagactgattacttttaatctcctttgtaactaaagaagagccaaaatggcgctcacctgtctgagacttccttttggtcagggtttttgtgcaggtcttgaatgtttcatttacttctgaatcagcaaaatgtgagtgctttgtatttgccatattagagagaagtggcaaagcagtgagccaagaagcagccccaacttggttcggcttttcagattacataggagtgcacagcttgctgctgatgtaaagcatgtggagagagcccatggagaattagttttctttcatgattgaatgctaatacttggtagtatgtggaaaaacagcttcttgcttgtacaggccaacagctgttgttatctgaaaaataatcattatgatagaaagcacactttttcatgttttctgtcagatctgtcagaatatgttctgtgttaacatatgcatgtttcatctgagaaaaaaatgtaattggtaatttaatgtatttttaaaaatttttcttagtggtaacttggagcataccattttttttaagttctgtaccagcactgtctaatagaaagtaggtcaccaaagtaattcttacatttaagtaaagagaaacaggcataattaatttaatatagtttatccaacccaatatatctaataaattttaaaatgtggtcaatataaaaacaagaggtttttgtgttacttttttgtgtgtgtgtgtgctgagtctttgaaatccaggacatatctaacacagcacccgatttgggctaaccctgtatcaagtacccaatgatgatgtgtggtgattggttaccctcctgaaccgcatacactgtagatgctcattcctggcatagtgtttgaatctgtatgtttgaatcatagtgtttgaatttatgtgggttgtttgcccatgtaaatgatgaactatcaaatgccaagcagagatcttcagtttatcagctatgttacctgttgtcaactgaatttagtctaaaaccttggtcaagggggaagacaaggtacaataatatggggatgtttataagaatatacttactgcttaaaatttttctagatatttttggtgcaattcaagttttttttaagttgtggcaacttctgaagatattttaaattttaagtttataggaattttgacattcttccctctatttaaacacaagagccataaaattgactattttcctgtgaactactttattttttcctttacaaatcagagattatcttgtgtgaatgtccttgttatagtgttataaaacaaccctatcccaattaacttcaactagtaatttggtctttttaataaaagtttacttcactattacataattttgtccatttaaagcaaattttgaaaaaggaagttttgttgggtacattgtatgggactattttcagttgttgttaggaaaataatttaaaaagattctgtttcttatatactatagccatacaatttcttgaatgcaggtagaaaaaaaatacacacaggctgtacattaatcacagatagttcgtttaatcaatatatagtttttttgtttgttggttttgttcttgagatggagtctctctctgtcgcccaggcgtcgcccagtctggagggcagtggcgtggtctcagctcactgcaacctctgcttcctgggtttaagcaattttcctttctcagcctcccatgtagctgggattacaggcacacacaaccccacctggctaatattttgtatttttgttagagatggcatttcactgtgttggccatgctggtctcgaactcctgacctcgatgatccacctgccttggcctcccaaagtgcagggattacaggtgtgagtcactgtgctggccaatacatcagtttttaaaagtgagacactcaacccaagtactgcaattcaggtggaacttactgactgttttggattgtttaaacatcctcatataaagtaaagtctagagactcttgtattattagttgagtcctgaatttgctcctttaaaattggtctgagcctcatttccttgagtataagtaatacaaccttgtgccaactggggactcagtaactgttggtcaggcagatggatgctagaagtgactccaagtccaaatctttgtacacactcaggattggctcagcatataactatacaattattttcagagaaacaatataatagaaaatattacatggttactgaaacaccaggggttcagtctaggtccttccatttgtttcatagaaagccagtcactgagacaacaagtattgccaaggaagaaggctttaatcacatgctgtaactgaggagatgggaagtcagtgtcaaacccatctctctcactgactaaaatgaggggtttatgtagcagagaagaaatgtaaccatgtgtaggaaaacaggaattagggaggggtaagggagagaagttgatcaacaggaagcaggtggtctgttaggcaatcatgatgggtgagggatctgacatctcattgtccaaatacagtaatctggtgagtttcagctccttgatcctatctgggaggcctgacggttggtttcttgagaaaggaactcagaaaagacaaacataactttctcatgttttaagactgggagaatcaatttctatgtttattaaaataaatcatacacattagctctatgggacaattgggttggtttcaatatgtaggaatacagatattttaaaagtatgtaatctaggaaagtaagtatatatatgacatgcaatattatgtttttttcttaattatattttttctttttaaatttgctataatttgtagaaaggtcacaacaaataaagaagtttttaaaagttcaattggtttgtaattcaaaaaaaaaacagttcaaatatgccttttagggcacagtatcttaactgtttcagcaatactgtttttcacatgtggagtttttagtgtaaactaactgtatctacttcttgggctccattagaagcaagggatctatgatttctttgggaaatagcctaatggtttcatatctcaaatgatacctttgtttcccccttgactcatgggagagcaagagcacaattaaattgattttaaatcacatttagcattatgtatcgattagatacaagtgctctgaagcaaatgtcacattgttcagcattggataacagaagcaatatgcgctttcatttctgttaagtaattcagccaatgttataagtcatgagagtgagatacacgtggctggtaaatggctcccaaaccttgttattgaaatgcagccttcatttcagtttattagcttgttccttgttctcatttatactttattaccttggaatacagtcatagtatactggaaatggagttttctttaaataaattgttcctaaagtttttaaagtctttcgttaagtggtgtctaggagcagacacaatgtcggccaatgcaggttttgagataagggagggcaaaaatcttcctctgagttggctgtgatagcatctctatgtccctaacttgatttctgtcatctttgtttctggagaacaaattcttggttgtgatagggatggagtggtgggggaaatcaaggaagggatggctcagaagagtagaagctggttatataaagcctcatattgttgaaaacgattctccccaaaatagttgccttttcacatctagggacagaataatagcattaagagggaaaatcagtcttttggaggttcccacaggttccacctgtgtatatgagattcagaagtagtgtgatggttaacacccattcctagatcccacagccctctggggaaaagaatgatccagctagtttgtctatttctgttgctgcatgtccatttgacacctagctcgttcttcattcataatcagtttctttctgtgatgatactgtctgctcgaattttcctccatcgtagatactctagtgtctgagcagatactctatagccaagcatacctccttgatcaggccagaggctcagtcatcttgggtaggttggaaaggcagcagtgccacagatgctgcagccaggctacctgggttcaacttctggctttatcatttaggagttttgagatagtagaaaattttcttaacctctctcataccattttctgatatctcaaatgaggttaatagtaggacattgcttctggggtagctgtgaataccaaataaattaatatatgtaaagagctaaggacagtacctagtatagaatagatatttaattagcattaatgaaagaatctagtggcacttgttctagtttgcagctcccttgttggatacacccctcatttttgtgtacatggtacacagaaatggtgaggaaggacaagtgcattcaggacaattgtaccttaataatgtgggagaatcatgaggtacagatcttagggcatgcttcctggagtgtcagtagagtatatttcttttcttttctctcttttttttttttttccgagacagagttttgctcttgttgcccaggctggagtgcaacggcgcaatctcggctcaccacaacttccacctcctgggttcaagtgattctcctacctcagcctcccaagtagctgggattacaggcatgcgccaccacgcccagctaattttgtatttttagcagatacgaggtttctccatgttggtcaggctggtcttgaattcctgacctcaggtgatccacccacctcagcctcccaaagtgctgggattacaggcgcaagccaccatacccggaccgagtatatttctatgttaaagaattggagtgacaaagaagctaccaagtcttcccaacctagggcaggcatgagggcagagttagagattgcctaaaattgtgttctttgtcatctaaaacatgaataagccaaagttcctgaccccaaggtgactaaggtctgatgggaaagagatatgaaaagggcagttataatgtatagaggaaacatgaaacttggcacttagggacatgtggggagaggggaacctatatccacccatggaaagaatggaaaaaaaaatcaggaaagggcactgagaggtgcaagaaactaggaggctagctaagctgatggatgagtaaagaaaggcattccaggcagaatggatgaacatcatgtacacaggcctggaggtaagggtacttcatgaaatccagagtgtctagagcatagtgtaggtgaggagaaaagtggcagtaggtgagttggacttaagattgcacaagaccttcaactccacgctaagatatgcaggggattctggtgacaggaggaagccttggaagaatcttgaaaagggagaggttgtggtcacatttgtcccttagaaatggaggtctggctgcctttcaaagaactgagggatgtgaacaagactgtggttgggagcttctgctttaaaatatgcacactcctgtctctgttttccaaggcactcatgactttgatgttcctttagcttaaagccatatatagtctgctcctggcattaggtgacaagatgtaattgtaacacgtgtaaatcagattttgcaatcccgttctgtagacaaccaaactgagattgatgcatttccagtctttcacttctgtaaagaacacagcagggaaccaccttgtacatacatcttttaggcatttgtccaattatttccttaggataaatttctagaaacgggtttggtgttttagagcttttgatatatatggttccagaacaatctggatgcctgaaatcatggcagataaacaggtgctgagtttcgtggccatgctgaaagtgcagacgtagaagtgaaatgcacagtgaacagtcatgcctggatgggcacacatgccgaatttttgtttggatttctttataccggtggttgtctccaccggtggcagtaagactctgctggatgaggacctaagactgatggggtgtttgtctataatgacaagtgcttgactgtagcagcaaatgatgagcagccctagggagacatcaccacccacttgagagagatccatgaagggtttatgacccgtttgaatcctgatcgagcattgctgtcttgaccctccaggaaccaattgtctggaatacttgctctgtcagtctgagtgatgtgcttagaatcccgggagcccagttgtttgtaaaacacagagtgaattatcaagaagacttagagactggaaatattttattgccagattccacagccatttgctaaatgtattggtgagatcatgaaagccaacatccaatatgttggattaccacaatcggctataagttattatttgaacatatggggcaattaatttttaatttgatgataccaaataaaatggttttgtctttcctgtttgtcttttttctacatcaggagcatttacttaccatatagatgcaagtctttttcaaagttctgtagaaatataaacacacatataaattgttcactagtagccacaaagtgtgtgtctagtcttctgagaagtttcttaaactgtctggaggggcagagggtctcacaggaggtgacatgtagctagaatagaggtaagagcaagctaccagagctgactggctttgttctgattgcttctttctgctttgagatctttttgagaaaaggcaggaatgcagatggaataggtagagtcttacggtgcttggctttctgctgctagttactcacctaacttcttttccaaatcttaacccatttcccatgctatagattgttccacagttaaaaagaaagaggggtctgcttgcctcaagcagctgggttaggttcatgactacaggttaagatacagcactgttatgattagtagttgcattgttcattgaacaatattctctatttgcttttctgtccactggtaaagaatgtcttgttagaatcctctagtagtggttcagattgccaggggtctctagtgaggaacacggtattttctgtacacagggaggctgctttcagctgttttttaaagctaatggctaatggctagaacactcagctagagaacagtgatcacaaaagcttcgataaatgttaaaatggttagctaaattagaaaaaaaaaagtagaaaatctcttgtataaataggtgaggggaaacatcaatattgctcattgaacagtctattcttctaatttgaaaagaacaactatttgtcatggttctcatccttgagatggcagttaactaattaaatccatatgaaattcaaaaggctttgctaagggacagtaattttcctgggttgttgttaaagttgctgggatgaaagaattactttgagcagataatggatggattcttctattgtgtattgaggtcctgaatcgactaatcatgctatggttatccatcagtgtgttaccttataatttgaaattaaaggcaccattttcatttattgcttactctagaggtaatgctgcttccaatttgtgaagactgtgacctgggtgggaaaactgctcctggtaaagaccacagcattaatcaagacacatttttggcttggaacagctcattgtatacaggtggggcacaatcttattattggtggtcttttatgtaatctatgtcaagtgtatggaatctgaagttttcatttctgtactcagtaggatgattgatatggtttggctgtgtcccccccaaatctatcctgtaattcccataatccccaggtgtagtgagagggacctggtgggaggtaattgaatcatgggggcaggtttttcctatgctgttctcctgttagttagtaagtctcacaagatccaatggttttataaagggcagttcccgagcacacgctctcttgcttgctgtcatgtcagacatgcctttactcttccttcgccttcctccatgattgtaaggcctctccagccatgtggaagtgtgagtccattaaacctctttttcttataaagtacccattctcaggtgtttcttcatagcagtatgaaaatgaactaatacaatgattttgttttgatcttaattgatccatgtgttagttgctcagtctgccactctcatctagatccctgtctctgctcattcctgccttactctgtgttcagtgcctgcccttcactttccaatagactacattgcctgtgctcccttacagttggattggatctgggattgacaagcatggtggctaggctgaaaatcagaggactggagcagaaggaagttggggttctctttcttgcttcttccctgattgagtgagcattacatttgacattgatagtccttcctccatgttttagctctcacagggctctgggatcactgtggcctccccttgccctttgagggatgccatgacctcctgctcttgctcttgtctgagtgcctccacctcccttcttgtttccttcccctgccagcccctccattaataagccttttattagagtctcttcatttgaaccatctgaattgaattaggttcccactgggaccctaatataggtcatttagtcaggacagcagagaccatctccagtcactgaggacaaactctatgttttacttacccattctgcttttaatacctgttaccttaaaacatctggtagtggttgtcttttatgagagtcttctttgttctggaatgataaataggagggttggctggtttggagttatcacattcattcataatattaaatatttagcacacaccatatgcaagacatggtctacaatggagttggcaactatagctctgggccacatctggtcctctggctatttttgtaaataatgttttgttagaacatagccatgcccgtttatttatatatttattggctatggctgtttttgctctacggtgtcagagctaagtagctgcacagcagagattgtatggcttgcaaagcctaaaatagctactctctgacactttactgaaaagggtgacagacccttggactagatgctgggaatatattggtaaataaggtgggcatcctctgtcatccagtcctggggacacagcagtgaacaaaacaacttcaaaccccttccctggtggagcacattttgttgtgggggataaagaaggtgatgaagaagatggaatatgaaacatagactgtgttatagaggggtaagctctagggagaaaataaatcagggaagaagcctaggaaatgttgtggttggcaggtgctgtcactggtgcaggaagcctggggacgacctccatgaggaggagacctggatcctcattttcctggcattcacttcctgtttcccacctcttatctctctcttctcatttatataattaacattgccagatactgccaaattgaaatctgtaaactaagagtgttatttttcgattactgtgatcatggaaagctgagggaaaacataaccttgtgaaattcttcttccagaaagcatttttacatttctcttcttcagcaatggggagatgtgggtcacagcacaggaaatgttttactccagcttcatcctttagtcagcagtcactactactagtagctctggactcaggcagaaaatactgttaaggggacatcgtccatttttaaaatatcgtacacagtaattaccattcactctgggaaagggtgagggggcagaagcaaacatggtttaggacaggggtccccagcccctgcgtcatggaccagtccatggcctgttaggaacctggccacacagcaacaagtgagcagtgggcaattgagcaaagcttcatctgtctttacagccgctcccccatcactccattactgcctgagctctgcctcctgtgagattagcggcaggattagattctcataggaatgtgaaccctattgtgaattgcacatgggagggatctaggttgcccgctccttatgagaacctaatgcctgatgatctgtcactgtctcccatcacccccagatgggaccagctagtcacaagaatacaagctcaggactcccattgattctacattatggtgagttgtagaattatttcattatatattacaatgtaataataatataaataaaatgcacaataaatgtaatgcacttgaatcatcctgaaaccatcaccacccccctgccagccccactccacccccatctgtggaaaaattgtcttccatgaaaccagtttctggtaccagaaaggttggggactgactgctggtttaggatgttgatgaatttattgccagctcatggtcaagttcttatctcttctgtgttatatgacaggaagtgccctcgcttgatagtatttgcatcatgttcccctttgaatgcggaaattaagtagatccctgccatcacgtcggtcatgattacacacatttggaaacatttcaagaacaattgtgtagtccaaaatgtaagtgcattcaataaaagcataacataacatgattatcctataaagcgaatctccttcctggtcctctccactacagtaaatgccctgctggcagggcagaggacactgactgaattttattctgaagtgtccattgtagtttgactctgtattgtaaatcctctcttgccttggtttatgatgtttgaaatgtcttgtactgtagaaatttagctttatatctacatcattgttttattcactaaaacctgttagattaaaaatgtaatgaatgtatttttagcaacagaataaatttagagaagagtttaaaaacccaactctgaaggcatttctagatgctagattattgctctgtagctttcattaattacatttctaaaaaacaaattgaaaacaaaacactatcattgaaaaaaatgtatgtaagccattttatgtcttaggttatgctgacagatgtgtaaagaaacttttaaacatttcaaactctaatactcatactgcatattatttaatttatcaaaagtttttagtgacagtctaaactcaatatgaggcttaaggggcttaataatggtaatttaatttggaatcttttggcattttaaaaaccctctggccagttaacagaacgcaataaaacataattataaaaatatgtagcatggcttcatatttctacatttccagggtatgtttttcttctttaatcatctattaaaaacatatatgaataatatgaaaaaaaattgttttctctttcactctgtttttttgctgtgaagtgttgacctgctctttggaaaatattaagaatgaaaattccagggatatattagcacagtagaaacagtcacctttgtgtgaccttcagaaaccttcagaaatatctagaatgctcattatcattgaattactttagtcattatttgtagtctaagaaaaatagaaaagcctttttacccttaaaaagatttgaatctgttgaaggtactggcacagtaaccatatttgttcaaataaagaaaacagtataccaaggtatatcatcagccaagtaatatgagaagagggttaaaagtgattaccttaaaggaagcaaagagctaaagagtaaaacaaatgaataattttcaagtaatcaaatcaagccatatagtggacgcatttgttctttttctgccttttgttcataaccatgcttagcataacacttcagctccttaatcccttttcaaccacaactctattgtcagttgctagtaactggaattctttttttttttttttttttctgatggagtctcgctctgtcacccaggcttggcgatcttggctcactgcaagctccgcctcctgggttcaggccattcttctgcctcagcatcccgagcagctgggactataggcacccgccaccacgcccggctaatttttttgtatttttagtagagacagggtttcaccatgttagccaggatggtctccatctcctgacctcatgattccagcctcagcctcccaaagttctgggattacaggcgtgagccatcgcgcccggccttagtaactggaatcttgaggggcagtctgggtggtcattaaaaacagggactctggggttacaggaccagggttttggctgttactagcagagagatttggggcccattacttgacctttctgtgtctcacaagtttgttaatgaggagtaaatgagttaatacttctaagtactgagtttacttgtatttgaatgcctggtgtatcctaatacaaccagctgtttcttatcagcatcatcattattgcttctattgttaataagatttcatttcaacagaggattctagacctcaaagcagggttaaaaaaactgccctaccttggtgtttctggcaagcttgggaagttattccctttcatttctttcaacccttctcattagccagggggaagctttctcacctttctagtatttgctaatcttccttataacaaagcgtgggcaggccccaggctcagagcctcaggcagggatcccttccggctacagtttaatatccttttgtttcaaggttaacagggttagctgtctatctgtggcaagtgatactggttttccatttatggtacagatagaatgtttccatttaagtcaaagtaatttaaggaggaactgagcagatgtaaagaagacagaccggaatgatagtacaggaggcacagggatgtgagcaaaatcatgaagatcaacacagatggggatctgctccctaggatttcctcctctccctgtggagtctggaaacctcagtgtgacctggccttgtttccagcctgcagggcgatgttgtaccatataccaggttgtatgacctccctgggcttcattttccatgttctgttgggacactggctcactgagatctctctaaccggcttatgtggaaagtgtctcatcctcaggaagtactcaaaattggccagtaggagtcttttagctttaaaattctcatttttttctttattatccatgtagttggcaaagtgaaaataatgggaaaatttagtcaagcacttagacgcttgacgttatgtagatatcatcactgactacgtatttcatgaatgtgaaacagtgattcccggtggtgtcctgggagccctgcgtccccttgagggaggaggtactttgggccccagtaggaggagacagggccttaacaatttggttttaagacattttatatattttgcctctgtgtaggatttttgcaggaagttggaagtaggagaaagggtggggagaatgctctacttccatacaaaaaaatctaaactcatacctaaatagtgaatcttacatttcctgtatgtctttgttgccagtcttctatacagtccttctgctccttttattcaaagtgtgacatgtttagggaacattctagttaaacattgtatttttttcataattcagacggttcaaatttgggatatcatttcctctgatcatcttttatagtcgtcgcagtttctgtctttgtaatgtgataatcaagggcacaaaaatagtacttcctcctctacctctttctttatcatctataatgattatttctcagattacagtgttgtgactacccatgtgatcatacgattgtacttattaatcttttcccagtttaacagtgcaagtgcaggtttcaaagaaaggtggctggagacattctgggtgaggtgttacaaataacacatcatatcagttgtgggagctgaattcttgtttttcttgtccggtgcccttatttaccaactgggtgaacctgtaaaagtcagtgaatctctctggaccttagacttcttgttaataaagcaaaaggattatgtaatataaagttggagatggcctccaaggtcaaaaagttgataattcatttgtgcctattgactcaaactgtaattgggtataataacaagtctttccctgtgactcttggtaagttaatggggtgtcacatgtgatgacacatgcaaaaccaccttcacattgtagtatgtcatgtattataagtatttataaaaccaatgtgatgtactactattagaaaaagagacattttagtgctaatatactgcaggatctcctgaaatacacagagcaggagttccacacattgagcaggcatcataattgcccagaaaagcataatgaaaataagctgttgggcccacggtatttctatgggctgtacctggacaaatgtgtttcttgaaaattccatgggaaattctgctgtaaaatgagagttgagaagcatggatgaatattgctaaggtctgaatgtttgtgttcttccaaaagttatatgttggaacctaatacccaacatgattctattaagaggtaggaccttctgggaagtgattaagtcacgagggctctgccctcatgaatgggattagcaccctcttaaaggaggttggagggagcttccttgccccttctaccactgaagatgcttcaagaaggcgccatcttaaagcagagagcaagccctcaccaggctctgaagctgccagcaccttcatcttgggcttctcagcctccagaactgtgaaaaataaatttctattatttatacatcacccaatttaaggcattttgatagagcagcttcaatagactgagacagaaatcatattttaaatatatacagagagaggagatcctcagatttcagcagttctcctacaggctttggagttcctctgccccttagttctgggatcttgtgcaagttttgtaacccctcaatgcctgattacgcatctcttaagtgaagataaccttttaggtggctataagaattttttttggttttttgagacctagtcttgatctgtcaccaggctggagtacagtggtgcagttgtggctctctgcagacttgacctccggagttcaaacaatactcctgtctcagcctactgagtagctgagactgcaggtgtatgccaccacgcctggctattttttgtattttagagatggggattcaccatgttgcccaggctgatcttgaactcctgagctcaagtgatctgcctgccccagcctcccagagtactggaattgcaggcatgagccactgtacctggcctgctgtcagaatgtaatgagatactgcctgtccattattcgcagggtgggaagcacgtagtaaatattattataactgttgcttagagttggggagtccctgagcctccacaaaggagagaaacaagcatgttttcggtatctgtgatcacatggataacaggttcaaagaccttttactgttttcttcagtctcattaaaatttgtagctctgccattatgatggccatgtcatttgatttagtgtacaattgaacatgttttatttaataaattagttaaatagtgatcattacgatttgggtttcaattgagtccttgaggcaatatttgctgatataaaaatattaggtaattttaaagaattatcagaaagattaaaatattaatatgttcctccatttcaaatttatatctccctaattgtaattatccatctttcttatgttacttgtaattttaaataaattatagcacaagttttatagaaatcttttcattttatttgattggatgtttttgggtaagtttatcattttttaaagatttatgtgaatgtctgacattgataccaggaagataattgctacccaattcgaatgtgacattcagagcataccatttttctcccattacagtgattggacaaggattaatatttgaattaaaacagagtaagatgcattatgtttagcgttacagctgttaaaacgcactttattagccatcgtttatgatttaattgaaatcctattttttttcctctccagttagccatttttgtcacttgctattgcttctttttggtttacttctggcacttaagcctgattttcaggttgttgtcttgaaaatattttcttaaccaccacctagtcacaataacgctgccgctatcctgcgccacccccatctgccccagttttccttcagagagtatgcttttgtctagaagcttatgtaagaataaacaaatttgaaatgaagaggaagcttaacgttgtaattgtttttatacataaacaacgtaagagtgtcaacgtacttggatagttttctctgaatttaaaaagtttattttaaatggtgtaacttaaaatgtggtctggatggtgcctaaagaaactcaccttagagggattttgtgtgggagaaattaagatataagttgtcatcctacggagcgctttaaattgaggtactgaaagagcccccagtgactgcggttttgtgagagctgctattgtgcatcctcttaggtcgttttcctgtttttcttcctgataaaaccctgttttgtgtaggcacctaccctaccccttcccatgaaattaaagaaagatgattctaccctcagaaccaggagtccatcctggcatgaaaagaccaaaagtcggcaaccccaaacgaactatggtaattacagtgcaaccactgctggggagaaacagcccccctcagtgtctctggaagcttccacggtgatcactttatttgtgcggtttcattgtggctgtgctgctgtttgagttgggctgtttgctgttctggtcacggacttctatgtgctcatgagacaaatttctgtatcttcctgtaaacacagttctgcacattccagaaaacctgatacatttctttggtcccaccttaatgtgaatcaatgtctctgcccttttactggcagtcagttatcccaatctatataccgttccatcatctactctgttcgttgttttttttttttcccttaaaaacatcaccctgtcagaatgtgtactctgttgcagcaaaaatcaattatacatattgatcagaacttgtcagcagatcctttgaaggtttacaacacaccgttttgttctgccatactagtcgggaagctgtggccaactcctgtagagtgagggtgatgggtgagtgggtgggtggatgagtaaatgaacaaagaatgaactagtattaagaagaaaatccaaagagattatggtaggctgagtgatggcccccaagtatgtccatgtcctaattcctggtacctgtgaatgttaccttatgtggcaaaagggactttgcagatgtgatcaggttaagaatcttaagatggggaagttatcctggataaagtgggtgggtgcagggtagtcatagtgtctttgtaagaagaggaaggcaggaggaaggtcagaatcagagagcaggccatgtgacaacagaggcggaaactggaggatgcactttggagatgagggaaagaactacaaaccaaggagtataggcagccactagaagctggaaaagatggaaatccattcttccttccgaatctctagaaagaatcagcctgccaacaacttgactttagctcagtgaaactgattttgtacttctggcttccagaactgtaagataatatatttgtattatttttaaccactcagtttgtgataacttgttacagcagcaatcaaaaatgaatgcagagagtcagaaacttttaaaaggtgaattaatgagtattgaagtcaaactggactatacgattctgctgactcggagtcaagttctctgtccatcacatcacatgatcaggatgtcagtcattgtggtcttgacccctctgatgaggtttacttgttgtgacaaggcccaaaggaagagggatttgggtagaatttgcttgacctatttctgtgtttttgtaagtttttgttttgttctgttttgtttttaaacaactggtttctttctgtgaaggaacatttattttttcaccccccagatgcctttctttgcaacttttgctgtcatttcatttggttgatttctatttcactcttgattcagtgttgtttctttcacaataagataaataaaatgatcagaaatcgagcaagactttccttttgttagttctttcttttgatgtccaaagaaaaaggcaagcagttactgtaatttttgctccttaatgtgatttttttcttggtgcttattttcaaacattttaatgtccagaaaagccctacattgctttatcactgcattataccatgatgtgttcagggttttttgtttttgcttttgtttaagatgcccagaatggggcggggcatggtggctcatgcctgtaatcccagcactttgggaggccgaggcaggtggatcacttgaggtgaggggtttgagaccagcctggccaacatggcaaaaccccgtttctaccaaaaaatataaaaattgtctgggtgtggtgacatgcacctgtagtcccagctactagggaggctaaggcaggagaattacttgaacctaggaggtggaggttgcagtgagcaaagactgcaccactgtactacagcctcagcaacagagtgagaccctgtctcaaaataaaaaaaaaaaaaaagaagaaaaacttgcccagaatggaattttgaactagtacttcccagtactagagttctgtagcaactgtgaagctttgacagtctctcctacttgttgtcatgttggcacactgatttgttaatggggaaaatattatatatatatatatatacacacacacacacacacatatataattacatattatatgattatataatgatatatataattatatataatgatatatgtatatatatttccaatatattagcatcacttttgtgaggatccacccaacacaaactgcatgttagtagctttgctgtagttaactactgaaatattttatgagatctgggggtgaatagtaagcagtggaaaaatgtgatgagcatcagaggaattctaatagaccatttggtaaagggattgttttattttactgcttttttcatttatcaattacaaagataacaattgtcagtccaggatgaatagaatcatcaggaaaatttagttatatatgcacttgttatagggattgattttcaaaagttcttaagtagattttattttgtgggtgttcatacataactacaagaaaaaaaaggaatatgaactaatataagccatttgaatttttaaaaatataatgttgagtaacagtttgaacctaagaatgtaagaatacattattcacttaaaatgacacccttctgggccaatatactttcctgtaaagtttctttttattagattactgtatagctatggttaacacattttattgtgaataaggatcatttggaattacttaataaaatcctagttcttgggtcccttgttccagagattttatttcaatcgattaggaaaggactacaggatcgctctatttaacaagctctgcaggtaatccaaagtcctcagaccacactacattgctgtgtataatccatcagtaatcaaaatattgagtgtgtgctatgaaattattttaagaaattccttaaagtcttttcaagtcttttcagaaaagtagttgttggaaccatggtttgccatatgtaaaatatgctgtgctaagttacagaacagttttgaaaaagacttaatctgttttgagtgagcctgtggcagttgtaacattctggatttcattcaaatttgtagcaatgcaaatggcatgctttagatgtggctgtaatgcatttagctcaatgacaaggaaactggcagatatttccataagacatactgattgagaaatagtgcttgctgctagtggcttgatctgcatacatttaggatttaatagtttgcattttttgcttactcacttgtcctaaatgcttaatgaataggctctaaggctttaattttcaacctatcctaagtttattactaaagtttatcaagcaataaacacactattgcacttatactgtcatgtttttataaagcagtttataaaaggtgacatctggcaaagaggcagatctataaaaatcatgctggtggatgtagtgtcattttttctgccatacacccagaaagagtaatattattttgacacacacatacatccccactgtcaagtttctatttttatagttagcttactgcatgtatccttaagctatacaaaacctttgggctaatgcaaaaagtgacatttctgcatatttattacaatgctattttagaggttgactttgcctgataggatttttccaagaacaatgtcatgttcatgacagtagacatcattgagaacaatactattgtgtagttagtcaggaaaggtcaatatggaaggacaaatcataaattgcttaatttaatgcagcatgattttgcctcaatatttgctagttataggggagaaaacaatgataacgtggcccagatgagcaattctttgagtagttggaatatgaactaatactttaccaaatgagtgcactgccctgcgatccagcaactttacttctaggtatatacccaagagaaatgagtgcatttgtccaccaggaagatgtatgagaatgttcataacagctttattcataaaagccccaaactggaagcaaccaaatatccatcagcagcagcagaatggataattgtagtatacttacaaaatgcaacacttcagagcaatgaaaacataccatctactgccctgtgcagcagcagtgatgaatttcacagatagtatgttgaacggaagaagctggatgctagagcgtaccttctatgtgatttcctacacatgaaattcaagaactgacaaaacttgtctatcataatagaagctaggatactggtttcttatttgtgtgggggtaggatggggatgtttattgagggaaatgtctgggtagggtcagagagaggcttctggaaacatgtcttatgacctaggtggtggttactcgtgtgtatacatatgcaaaagagcagagctatacacttaagattagcccattttattgtatgttctggctatctgttgctgtgtaacaaactactccataacacaatagctgaagacaatttattattattatgtctcccaaggttgtgggtgagagattcccacagggcattaggatgaatagcttactgcagttcattaatgtctggagcctcagctgggatgactcagatagctggaggttgggtgggcatctttccctttctctcgccacatgctgtcttgggcttcctcataatatggtagcctcagggtggcagacttcttatcttagagcaattcaggatttgaaagctagtgtttgaagagaaatgccagtttcttgaggcctgggcatagtaagttctgctgaattcttttattattattattttaaattttaaaatagagacaggctctcactgtgttgcccaggctattcttgaacttgggactcgagtgatcctgctgcattggcctcctaaagtgctgggattacaggcatgagccaccgcacccagcctctgctgaattctcttagtgaaaatactcagtggccccaccttactcagggagaaggaacatagacccctcacttctggatggaaggaatgttaaagattttgtggccatttttattctgccacaccatatgttgctatatctcagttagaaagtttttaacagttcagatcaacctcattactctcaaaactttcttccttatgggtagggagccttttgtaaaatgtgagtctagttctgaaaaacaaacaacaaaagaaaccctccatttgaaatcatagtttctgtcacatcatacttctcttctcagtttccttttgaggtgaaaaattatgattttttcttattttatttgaagtttctgggctttgagttttattttatccaggctcgggtgaacttagacttttatttaatcattcacggcctacagttaactgtcagattgaagccagataaggcttctgatactactgaaatcccttactccttttgatttatgggtaatgaatttgccctctgtagtcagagcatgattttttttaaaagaaatcctatatctcttattaatcatctaccagaaatatgttgcccaacaggcctctttgtaaagatctgtattaagacacaagagcaggacagctgcatttacgcagcaagactttatatgagattgaagggaaatgtttatgcaagctaaataaagccagtgtgaaagcgagccttttaaactattcggcttcatttgaacatgacactgatgtagacagcttgggaaagcaatgtgtgcacacaaaatctgcattatccaacatatcaaaagatttcaacgccagtgcaccaacagtctctagcagagataattattgcacccttgcctggcctcatttgggccaagagcagcacttgagcctgatctttaaacaacattgtacatctcatttgaagacttttctggggccatctctcaattttgtgccagtaacttcaaagtccgtttgcacagagtcaagattagaaagatctaacctcatcctctcagattttcttttttaattaattgcaaaatgctatgcttttgctccccccgggaagcctgaaaggatttatgcagtcatttcatatcaccatattttcaagactcagctatcatttgtcacttaaaaagctttgtggaatataaagccatcaacccagcaccacagcagtatcactttgtcaaaagagagttgtttgcactttacgtgacaacctatttgtataaagtgacagggtttgaactaaatataccacatgaaatctaagttataggtgatggaatcttgtttgtagctctagtcgttagcctgctcacactcctcccctgccagcctgctcactcagcccctgtattctgctaatgtgactgttttcaagagatccctttaatgtagacaatataaatgcggttgcttgacctacttgagaaggcacctaattttagagaactgggtttttacatattagtttcctcttgtgatccctgactcctgaatattgtagagtgtttataaaagtgtatgccaaggtgctaatgcacgtatctaaatatgtatttatatcatatgtaatgtttagagcatgtgcataggtgtgtggataacatacatctgtgagtcagtgagtatgataggagtatggccttaggaattaattggctggatgctaatctgtgtccctccactctcaagcaagatgaccttggagaaaataaactaatttgggtctgtttcttcatctgtaatctgggggaaatcatatcaacctgaatcaactgggttatggatgcactcggtctcatgcgtgtcattgtgaacaccagtaaataccagcgctcttattaccatcacaattagcacattttctctgtagtgaattgaggtgattctttgtggaaggttttgttttgttatttttaaacattttcaagaattagttgttcctattcaaattgttagcaaaaaaattgtgtgtgtgtatatacgtatgtatatacatagtacctacttcagggaggcgttgttaaaaataaagtaggtcctccctcagatgcagtgttttttaatcatacttctcaaaggtagttgataggctggcaggagcagcttagatctcccctaggaacctattggaaatgcagaatctcaggtccataccagaactgttaaatcagaagctgcatttcaacctttatttgttttcacactaaactttgcaaaaacactttcctggtagaatgaccactggttttgggttagttctaatggagttctttaaaggattttaaccacagaattcagtaagaaatacattttgtggctgggtgaggtggctcatggctaaggtcctggcactttggggggccaaggcaaggaggatcacttgtgctcaggagttcgagaccagcctaggcaacatagtgagaccttgtctgtacaaaaaaatttttaaaaaaaatcagccaggcatgatggtgtatgcctataattctagttactcaggaggctaaggcaggaggattgcttgagcccaggtgtttgaggttatagtgagctatgaccatgccactgcactccagcctgggctacccccatcttaaaaaaaagatttttttatcccattagtacaggagagcatctatactcctacacatatataattaaaggtttcaccaaacagtgtttacccttgctgtatgctaagtactcagatttttttaaaaattgtatttcagtttaaaacatgctggtcacggcccactaaattgattttataattcagtttataaagaactattatactgtattaccttaggcaagtcgtttttttcttccttaggtcttgattttctcaactgtaaaaatgtgtgggttggactaattgatttcaaatatctgttagcttgaacagccctgagatgctctatgaaatgtgaaagtccaccccgaccatgtttaagaaaagggcatgtttattggttgttgtatgtgtcattttattgagagggcctgaaggagcccatacaaatgatagctcacaaaccacagcctttgcataataaaagcttatagctcagaatggtagacaacacagagtgagcaattatgcattggtcctaatgtgtcattattttagacaaacaaaatacaactgtaagcttttataaatgtgcgtactttgttagtgtataactaaaatataatgagctagattctttgcctgcctaatatacactcagaatattaagcagtcttgtgtttggaaaaacacagtagccatatagtgaagaaaccagacaacatcttgacctgtgatcagaattcacatcaccattcatgagcaaagagatatgtgtgtgtctcctgatgcagtaccctgagaagcataaccaatatggtacttgggtccagaatatacaacctgaatctaaactcaaggacacagcagagaacccccaaatgaggaatagttctatttaaacaaaatgaaacacacacacacacacacacgttggggtagaggggtttggggcatggaggtgtactgttaaaaaagaaaacagaaagacaaagtaatgtttgaggttaaaggagacttaagagttaggaacactaaataagatcctatactggattttatattaaagaggggaagatgccaaaagggatgacgttgggttaattgacaaaattgagaaacagaagacagtggactggatataatattgtaccaatgctccatttactgaaattagtaactgtactggggtggaaaagaatatctttagttttagttttaagaagtatgcgctaaatgcaatttattttcaaaggaagcaggaaaaaatagtgtgtatacagagagaaagcaagcaagaaagtgcacaaatgataggcagatggggaaaaatataataaccagtgaatctggggcatacacagttgtcccctgtactcatctaattcttggaccatgtagataagtttgaaataaatttcaaaataatttcaattacaaatttcatttgtaaatgagccctttgttttctttctttcctctaatctgtgtccttgtgtgtttcaggaatacgtagagtgcttttgtcttgggggttgtgccttttaaggccaggttaggttggactggaggctccagttttccccagtagctgttagctctctcagaagccaactggagaggcttggactggtcacctcctgcacctgtgcctttttggtctgttcctcttttatcagtactgacccctaggcctagggtgggggaaatttatcattgattgtctgtctcctttgcttctgttggtctttctcacttggccttaggcttttcttgacctccacccaattcttgttctacttcttgccccaggtaactaaacccttattcttttcagcaccagtttctttaagagagcaccattcccttttgaccttgaagaacacctagcatcccttgaaaaacaccacagaacagagaggcagatgtcaacagatgtttggacatactggtgggtcaaaagccttcaaataacaggtcatgggctctgtggagacctgaaatccatgaaatccattttggtttttctttcagctttgacttgcctttcccacggcagagaaatgtgggagaagtaaataaaggttgcctttgtttacttgctttcttgcctgcctgctctgcctgcatgacctgattccagacagcaggcaggtgctcagtaattgttaattaccctgtgaagacgtgtccttgtcctcaaggagctacagtcttatgaaatgagacactcgaatgtgaagtggactgaaagcacgtgtgattaagtatattttaaaaattatagtaagtaatatgtagtgagaatctagggaacccagagaccattgtggctgtgggagcgacttgagctgatagaggaagttggagagctgcgaggatgtatccccaggatctatataaaaagccaccacatggttctatattgaaaaaaaaagttaaacaggaaaggaagcaagcaactatggtataggatctcagatggtttgcagaagaatctgacctcagagtctgttggcttactgaggagaggaagctcaaacccttggatctcagggtttcacaaaaagcctcaatttggagtttatatattatttccagtagaaggaatgcacagaaaatctttaatagaaggtaaaaagtcctctgtcacaccacttgagtatttccttgctatgcttttggcttaaacaaaaagttttgtcgtcatcttgggactgtcataatcattctgcagtgtattttttttagtgttcaaagtagcctatgttaaaatggaccatactttttggaccactggtttgaggtttttttcttttaatataccaaagtgtcagaagtggaaatgggggtctcttgtcctcccagagcctctaaccatccccacccacccttgtaataaggtttttacacagcactttatgtatttggtgaggtggattttcccctctcccaaacacctccctcaacccccaagataaatggttccaaaccttccgctgcaagcagagctggtgtttagtttattggtaattaattgctagcacttccctgacagaacataatggaactacagagcaatcacttagaaagggaaacaactgtcaattatcactctaatgaatcctgtttaccagaggtgacggcactaaggctccaagcagcctagaaagtggatatcttaaaaactccattttcgtactgggtgtgtgatgtgtgagataatcactctctaggccagattttaaagtggccccagctgtggataacagtatataatttcagagctattctcacagttagtgattaaatactctctgtttgtatttgaatatgagtaaatagaaacaaccattcctcacattaaaagttttaaatagtatacttttggtgatcagttatagagatgattataggagtgatgtgatagatgacatttagtgaatcatcggtaacccaggtcctatgctgaacatttcatatgcattatctcaattcttaaaacaatgttgtgttcagacagttggcagaaaggcaaattcatgctctcatgcaaatataaaatgaacacatcaagattttgttcagctcactaattgttggggggggacccaatgtaacgttaaagtcagtccaaagagcatttgagaggcatatatatatatatatatatatatatatatacacatacacctatacctatacctatacgtgcaatttggtagagtgttgggttagatacagaaaggatgatgtcctcctggtctgtaacagcccatactaattattccctctcctgagagttgtcagttaaccctgtaaacagaaagtcaggcccaatagtgggaactctacactgaaggaatgcagtaagctcaatcgcctctttccaagtttgagatgacttttctgtaaggcaagtaatactgtcatccatatgtgacaaatgaagaaactgaggctttgtgaggttaagtaacttggccaaggttatagtaaaggtggagctgagactgactgaagtctgactccttatatgggtgacttgagcttaataaatgcatggatttatcaagttcaactcccaagattgctgctgtgcagcacgattactgtccgttgttttcctcttatctgcgaagtagtgttgctgatagtacttacctccaaatgacattatgaggattcagtgagtcaacacataaggcactgtgcacagtgctcactgcatagtgatcccttggtaaatgttggctactgtcagcatcattagcaacaattatcacagtacacgtgtgtgccgaaccacatgtgtctcaaaaagagcagtgtcctcaccttctctaccttggccatggttgccttgagggtctgggcacagacagcatctgagctccagggatcatcatagtagggaaacagctctctcccagtgtttgtccagggtcaacactggcttcagctgaccccaggaatagactggtctcttagtatttgagaaaatacctcttttcctgggaacaaaacaacaatgcaatgtagctcataaaatatttgcccttgctgttttatgacctgtgagacatcaaggatatacagatccatgatatttgtagcaggtgtcattttttaaaacacactcaaagtaaatatcattgtcaaacaacacactgaagattttatttgatggtaaaaactcaagcatggcattcaatccttcttccagttcatattcccctgtatcagtgagaatggattttaaaagttcaagacttgtgtggatattatctcactgtcttccttcgggcagatgaagtattacagacatttctttgaatcttgtctattggaattagggagtgctgaactatagaaatcaaaggtcaaatgacaagatggtgtgtggcaggcgaatttactgacttttctgttaagacttctctgtagatgttaagaaagtttgaagtttttgaggagatgttttactggagacagagtgctgtactgcctcctcctctgtgagatgagagccttattgcagtcagcgtgtctgcatttagctgcccagttgtgtccataattttatgttctcagttttgttgtgtggggaagaaagagatagtcatgtcaaaagggggcatggtttcttaatgtggaagtctaaagaatacacagaaataactacctctgccttcacaggatttctgtcagatttttgcctaattataaaagaagtgcagcatagaggtcttattactgtggctaagatgaaggaaaacactctcacgatcaatcctccatgattttattattattgataattcaaacgatatgactgtactctttgagcactgacgagcaccaagtgtatttttaaacatgccaagtgtgattagtactccttctacacattcccttaaatttgtaaaatcatgtaatgtgtttgttttttattttatatttagaattattgccttgtaaactctcttgccatactgcaagcagtgcaaagagacccattttaattttgcacgtgtattgtcaagaatcattatgaagatctacaagtaagggttgaacagttgttcctgatggaaatgacgcagacagaaagaaaaaggaattgaggagcctctcagtctaaaaacaggcatataagtgatatcttagtaattcgtgtcagaatgccccaaaatctgttttacgttttctttgcttcatggaaaggctacagactgggttaagtatttttgcagagatttctattccacatagccttgactccttcaaagcaaatttgttttctcttttacctttagtttcctcaaacaaattgggactaaagtcaccagtgaaataatgcgggatgtattgacttaggggagatatgtttttaattttaacttcttgggaagttgagttgacgtaaatcctctttaccatagtctgctgagttttgcgtactctagttctaatcaaaagtcagacaaagtcaaaagaatctggagttaataaaattctcctatttgttttccttcacaacagtgatatgtcttagacttttacgctttaatacccctcatgaagacataccacagtactacatgtaggctagctttagaaaatcttggaattatggtttaaattgtatagtcattaactgacagaatttgcttttctaaaatacaacttttaaaattagttgttgtgacctttataaacattaagaattaaggtagaatgtaagtgatgcagtctcattaaatttaatcaagttcaataaaaattccaaattcaaaaaccgtcttcataaaactgtgcgttatcaccaaaccattaaatagcacatcagtttaaaattattaaaaattgctaagtatccatttagcatgagatacgtgttatgactgcagacacctccaaaacaaatcgacagtctattgcactgcattctgagaatgtaaaagcaccattacttactgttaatggtacttctctaatgtatgtaaatacctcatctgtacccaagctcttggcagttatttcttacttcttcctagacagtttaaagatcttaatttattaatattcacaacaagtagaaagataaacacattgttttgaagcccttgatggatggagattggagatgcacagtgtttgggttgaatcaacagccgagagtagatattaacttgttggcagtaactcatggccctgcatgaaacagaacctggaagagagaagaagaatttaaaatgctgttattgagaatctctggaagtatattattccaaggtaccttagattttaaaatttggcctcaccctacacctattttatgatttgtccccactacatcaaactcagtgtatgctcttgccatggtaagcattttttattcactttactggaaatgattgacaaggacttcttcaggatacattgggagagcagtgtttcctatttattatgtcctttcatctctgcctgacctagaatattcatgcttctgtcttaacaggtcccatgttataaaagtttaaaaaaaaagaacaaaaaggaatattctgtgttttcttgcaaaccccagcccccaatccaaacaaagtgaatggcttacagacacgagtggtaggattttcaccaatttagatataaaatgtgacaacggacagaatctacattcaatgtctgtatccttctcaattgccacagactgggtagtaggaaagcaaaagcaaatttttgtagtaaaaatcttcttggcattttatttttatagtagattagattcagagattttaataaaaacttgtctttaactttgtttgatagagatgtacaatcagcttagcttggttgcttaataaagttagatactgagaattgatgaaattttaaatccagcttctaatttagagttcccagagttagcaaataggagtacagggacccagctgaatttgaatttcagataaatgtaaaaaacagtttagaataagtatgtcccatgcaatatatggcacatatactaaaactgttttattatttatctaaagattaactgcttatcctatgttttatctaaaaactctattttatgatgataaaagataagtgctttttgtaagcatgtaaactcacacacttgtctcatctgtaaaataggagtaaatgtggccatgacctctaaggttgttgggaggattaaattcattgataccagtaaagctcatagagtgtttcctggcatctagtaagcaatgtgaaagtataagcttttgttcctgaggtgtggtggtcatttgctccaataagccaatacatttgctccttttctcctggtagagatctgctaaaagtaaaggaatctttctgatgcaattggcagcaattgttgatttacttgccaaaatgtaggctaacccaagtgaccccttgactgaaatacttaaaaatgtaatgtgctagtgtgttcacaggcatttaaaagagccacagaaattgtaatgtttcattttgcttttcaaagggatacttaataaatgtattagtgtgatatatcaggcatgctctagaacatctgtgtgtctacgtaaagaaggagagaaggaataaaggagacaagcaagagccaaggtgcaggtcacaattagtagtcatcaaaatgaaagcaagctgtgcaagggtacaagaattcccatctcattggagggaaatgcatcatgatgttgtgggtgtcttaaatgtaagaggaaccagtgttccttactattaatctgtaatcctctaagtgctgggcactcctgtctccagtccctcatctgagagctgtgtgtagaagtcagagtgggttgggttataatgcaataacaaacaatatgaaaatcacagtggcttaaccaactgggagtatttctcatccttgcaaagcctgcggaggttctaggtgatgctccaggacagctcacctccaaggggtggctcagcacgattgtctactgctgtcttatggcacctttatctcaaggcttcagggatgagaagcatagaaaatcacatatgggctgtgaagcggcacacatcaacactgatcacagcctgtgggacagaactggtcatgtggccctgtccagctgcactgaaggctctggaaatggtcttccatgggtccagcaacgggagagggctcagattcattagtgaatgctgctttgccatactggtaaatgttgctgatagactgtgttactctcctccacaaagtccatgagcaacttcaaaattctttactgtgtcacaggcagcatttggcaatcaaactggcaagagagctgaaacccattagccttatctgagaacgaaaacacattagccgtcctgcagtcttcttctaaaccagtgaaaatgcctatgacaataggaatttggatgtcatgcttagtgaattgtattttagaggtgaaaagaaatagtttcttctgatagcctctgtcacaggcttgcatatcaatttgaattcaccattacttcagggtgtgtttgatgtgggagaaagtggtttccaggtttggcagttgtcagtctcgatgacaatatttttaaaatgtacctccaatttgtctgaaatttacatccttcctagctttattcccatgcaacaaaaatattaaaggtttttcataactgtgacgaacaggggagaaacttattaacaaagctttcaataaaagttgaaaattgattttgatcctggtgtaaggctgatggcatcaaagctttttacagctcaaggcagtcttgtctaagataccttaaagtgatgcttgatgagaaatttagatcagcccccatttgagcctagccatttcagtccagttttcaattagatggaattttctggtgagtgacactttctaccaattaactttgataaaggagctcagcctcagaatattctcaaatcaggtatatgtgttagacgtcagtgaaatatgattgttggaagactggggaatacgaaagacaacctttgaaatgggaagtcacatttcaaagttctgcaaagtagttgcttatactaatcaaccatatttgttttttcttttaaatagttatttagttccaagcaatgtcctaggcactgtgatgatcactaaattgcattagaggcattttctaaaaataaaaagtgagatgtggaggaagaaaagaaatatggtaaaacatagaatcaagtatttagttgtctttttcgggataaatgtcagaggccctaagataggagaaattatgcagggttggagtaggcctgttgtaggaggtaaaagatctgtgaatattctgttgattaaatatgccaggaggagagaaagggagaagggcatcccacactgaagatataaacatttagtcagaagctgcatttcttgccttaccaataaaaaccaagctttccttgaactcttagagataaaaatttaaaaaaagaatgaccaatatcttcaaaaaggaaaacataaaaacagcatcatttaattcccacagcatattgattcaaagtggccttcagttaaatttctaattggaacctcctgatacttctttttaaaaagcaattaaagtagaggcaaaaatattagtctgacattgaatcataaccactttaaatatatttagtcaatatgggtatttaatcatctcccgagagcaaacttttttttccttttataaggttactcttacagtttttaattgacaggatgtatatttagcatttaatgtgtgtttttaaaatttctgaggaaatgtatgagtgcatttttattgtttgaacttcagtccttacagaaaaataagagtaatctgtgcttctacaccctgctccctactctgtagtccttctcctctaactagaagtaatattagtaactgttaaaattaggtgtaaaattttcaatgtttatcctaatcacttattttgctaaaacccgttaaagagtatcagaacaatttttagattctaagtcatgttatgagcttgctgttgcaaaggtgaaccaacaccagggaaactggggggtatgtcaaaaggaactggagaagggtaggagaaggttttgggagctagaactagccatgaaatggtcctagtagatctgggtcagaattgatcaactaggcagtttctagaacagagtttatgtgtatgggttgagcacatgaggctgaatgagtttgtgataaagaagtttaggtttagtcagtaattatagcttggcgagatacagtgtacttgtttcatgagtcataatgcagatttgcaagttatggctgatgttttcattctttagtaatacgtacataaggctatggtgaaacacactatctctagtttatatgtccagcttttcccttgaccttatgaagcaatgccaatatgacatgtcacataattattttcctattatgaaatattatttacttgttgactataaaggtattaaagtgttttaaaatcatactttcaggtcaaaattttattttaggataaataagagaaaaccgtttcagttttttaaataaatgaacagataagtctcctgagaaacgggaagcccaaatgggaactctagggatccgggggaatctagaatggactcgggagagatgctttgggtgcttgaaagatgatctagctgctttttagagatgagtttggaagcagggaaacttgggagatgactattacagtacaggtaaaagagaatgggggctggatctagggctgatggagtgaagcagatggatctgagagctatctggaaggagaacatcaggactgtgatattcttattttgactggtggggaatagggggagtcagaggtatccaaaatgcctcccatatttctagtttgtgcacatggatcaatagttgctggatcaatgctgaaacacaggacaaactggaaacaactgggttttgttggagcaagtgggaagtaggcagggagtttatcatcggagtgcaataacatgccctttatttatatcttgactgaaaattgacaaagcaccatcccatttcctatctcatcttatacgaccacaactgtggaagggcacctcggtgatatcatccccatcttacaggaaaaaacaaaacaaaacaaaatatggggctgcctgaatatttaagtgatatttagagatgcaaggctagtagctgaccatctttccattagaacttgagtcttttgactctaatcctccccactttgtaacccttccttttttcttctcaagtaaagctgtgaatattctcttactatccctcagttacactttttttggtcttaatttctcttctttgataggatctgttgtgataacagtcaagagaaagattttagtttttttgaaaaagtaaaacaaggggactttcacttctaggaaaaaggtgtactttttcctcttcctctcatttaggacaagtaaaaaatcctgaatattgtatataagacaaaactaaaaatattctgagaggtggagagaagtcagatcagctagagacctggagacacaagaaacaatatggtagtgaattccctagacgttgtttttgccttagctatcccagccctggaactaaagaagctagtaacccttagctgacagagggcacagacaaaaggaaaggttacagcgaaagcctgctcactgtaggtgaaggactgggaaaggggcagtctagcaatatagagaaaatttttagataatatctgtactactccagctaaacaccacacatacacacattgaaaaacgtgtggcctacctactcctacctccaacagcaaaggccaagtgggagccaaaactactatcgtcactgggatgtaatgagccactccagcctccttgtcaggttggtattacagaaagccaagtagagagccagaattctcatatccagtgggtggtaacgagtccacatggggagcctggattttcacctctaccaacagtagagaagtaccttttcctccactcaggggtgataccagaagaggcattatagacaattaggactttctcccctgcccagtagtaataaagccaatgtttcccaggcaggcaaaagtggcatcatattttttccatactgaaagaaaataactgtcaacttagaattctatgtctagtgaaaatgtctttcaaatatgaaagggaaatcaagacactctcagatgaaggaagaatattcatttattttttaatttttgaagttgtattgccccaaatgaaaatagtaggaaaaaccctgcagaccaacatccttcatagacagagatgtcaaaatttcttaacaaaatgttagcaaattgaattcagcaatgtataaagagaagtatacatcatgatcaagtagggtttatttgaaaatcagcaatggaatctaccgcatgtcaaccgtaaataatgaggttcaaagaatacgattaaatgtggagtttatcctagtgcagagcttgaggatcgtcacggctgactctacacaaatggatcagcagcccaatttggtgctgttgaggtttcatttacataggcagggacagagaagttccagcaggattacaacattttccatgcaagaccagtgcacatgccacagtaatttgattggttatggattgctacattcaaaggaagattactttattactctgtgagaaagggtaatgatctgagggggtcctgtccctggcactgcttggtcttcttaattatttacaagaaaaaagccagaagttgcagctgcatgccacttgactcaggctgcagagccacctctcaaggttcagaatgatttaaagctctaacagctttaagttgacttattttaagtttaaattatctaatttcatacacattagcaggctaagaaagaaaaatgacatgatcatatcaattcccacagaaaaagcatgtggtgaaatttaataccactttgtgataaaaacagaacactataaaaggaagagaatgttttcaaattgataaagaatatctgcaaaaaagtaacatacttaacattgaaagactgaatgcttttctttacggttgggaaaaagtcaaagatggtgactctcaccgctactattcaacacagtgttggaagatcgaatacttttgtgatattttgatataataaacatatttggcctctgcccctggttccgggtgcacaattcctaaaacttgtgaaatctctggagataagagtgttttttaatgctaatatgataactggtggctggggcccctagatagcctcagaatggggactggttgctaggagaaccaactatgtggtataagcatcagaactttgagccttatctcctgactctagggaggggagagggtctgaaggtctggatgatcatcagtagccaatgctgtaatcaatcatgcataagaaatgaagcttcataaacacctgaaaaggacaggatttggagaccttccagcttacagaacgtgtgatgatgcctggagggtggtgctcgtagagagggcaccttcccagagagggaaggtctacactccttcccacataccttgtcctctccatctcttccatctggttgtatatctgcataagtaaagcatttccctgagtcctgtgagccactctaccaaatttcttgaacatgaagaggaggttgtaggaatcctgatttatagctggccagtcagaaccacacttcacagcctggggtacacaactgacatccaaagtgggagctgtcttgtgggactgaacccctaacctgttggatctgacaatatctctgggtagataatgtgtgaactgaattgaattctaggatacccagttagcgtctgttggagaatctggtgtgagaagtgttgagtagtgtgtgagagtaggaaaacactttagtattttatgccccctacgcaagttctgatacttttaatactttcattattgatcttgccagcacagtgagccaaggaaaggaaataaaagacatacagattagaaaggaagcagtaaaactagccttttttttgcaggtgacttccttgtaagtcatacctagaaaagtctaaggaatctttttaaaaaatcctagaaataatagatgagttcagaaaggccccaggatattagaccagcatatagaaaccaactatgtttatttatattagcaatcaacagatagataccaaataaaaaatacagcaccttttacacacacacaaaaataaatacatgaaaatctatcaaaaaatgtatagaatttgtatggtgaaaactacagaatgctgatgagagaaagcaaagatgatctcaataaatggagagacatattctcacaggttagaagattcatcatagtaaatatgtcagttctcccaagttgatacagagttttaatataattcttatgaaaatatcagcaacaatttttagtagatatagacaagattatcctgaaattcatatgtaaaggcacaggaactagaatagctaaaacagatttgaaaaagaataaggtggtaggaattagtctatcatccagtttcaagacttacatacttgtaatatttatatgaccatgtgtcattgacagaagtatagacacatagataaatgcaacagaatagagaacccagaaacagacctacacaaatatgcccactggtctttttttttttttttttgcaaaaataaaaaagcaattcagttagagaaagaatagacttttcaacaaattgtacagttaggaaaaaaaattaacctatacctcacaccttgcacaaaattcattcaaaatgtctcatgaacattaatgtaacacttttagaaaataaaacttttagaaactagcagaggaaaaagtcattgggatctatgtctaggcaaagggttcttggacttggcatcaaatgcatgagccataaaaggaaaaattgattagtttaacttcaaaatttaaaaattttctctctgaaagactctgctaagaggctaaaaagacaagctgcagactgggagtaaatatttgaaaaccacatatccaaaacagggctattatctaacatttataatgaactcgcaaaactcaacaacaacaaaaaagacaaaccatttggaaaatgggcaaaagacatggacagccatttaactgataaacacacaaaaagatgttctacatcattaactctaaggaaaatgctaaataaaaccacgttgagatatcgctgcacatctatgagagtgacaagtggtgacaacactaaatgctggtgaagatgcggggaaaatgattcctttcgtgttgatttttattcaagttgtgaggtttatgtgaaagttcttcttgcttccctgttcctcctcttctttcccctcctccttccccccttcccctctatattagtccatttcacactgctgataagaacataccgaagattggtaatttataaagaaaaagaggtttaatggactcacagttccacgtggctggggaggccacacaatcatggcagaaggtgaaaggcacatcttacatgaaaggaggtgagaaagaatgagccaagcgaaaggggaaactccttataaaaccatcagatcttgtgagacttcttcactatcacaagaacagtatgagggaaactacccccgtgatttaattatctcccacctggtccctcccacaacacgtgggaatcatgggagctacaattcaagatgagatttgggtggggacacagccaaaccatatcaccctccttcctatgtatgcccagctgcgttagcaccatttgttggaaaagctatcctttctctattaaactgcttttgcatctttgctggtaagaatgtaaaatgatacagtcacgcttgatagacagtttagtagtttcttaaaaactaaacatataactgccttacaacctactacagtttgaatagcctccaatcctcacgtcaaaatttgatccccactgttagagatggggcctaatgggaggtgtttgggtcatggtggcagatccctcatgaatggcttagtgctgtccgggtagcaatgagcaacttctcactcttagttcctggagcatttccctgagagctggttgctcaaaaactacctggcacctttaccctctctcttgcttcctgtctcgccatgtatgtgatctctacatgctggctccccttctccttcagctatgagtgggagcttcctgaggttctcatcagaagcagatgttagcatcatgctgcttgtaaaccctgcagaaccgtgagccaaataaaccttttttctttgtaagttacccagtttcaggtcttcctttatatctattttttaagagatttctttttctgtgttgcccagggtggagtgcagtggctattcacaggtgtaatcatagcccactgtagcctcaaactcctgggctcaacagatcttttcacctcagccttctgagtagctgggactacaggcctgtgccactgacctggctactcatgtattcctttatagcgacacaagcggactgagacaacccagcatttgtgatcatggtcatttatccaagaaacacaaaaacttggatccacacaaaaaccgttacacaaatgttcctagcagctttattcataatggccaaaaactagaagcaatccagatgtccttctgcaggtgaatagttaaatgaactgtggtacatccataccacggaggctattctgcattcagatgaactattgatacatacagcttaatctccagagaacttcactgagcgtaaaaagccaatttcaaaaggttatatgttgtatgattccatttatataacatccttaaaatgacaaaagtatagaaatggagaacagatgagtggttggcagtgattaaggatggttagaggagtgagggcgggagcaaattaatgtggccagaaaggggcaacatgagggacctttgtgcgaatggtaatgttctgtatggtgggggaaaaacacaggtaagtaatttaactgaggctgtaggtttacttttgtaattgttattttaggcacagcatgtggctgtactcattgtttgtaaattcatgcctcttggtgtttagaaactaaaagtgtatataataaaattagatcagtattctggtgcaagttctgctgccagctaacttgtgaccttggtcacgttcttcatatttcctggaacctgggttcctctggagggctttcaaatgattcatctctgaggtcccttccagctgtagattttgatggtttcatgtttcagtgcatcaaatgcatttcaccatctcaaaagtacgcttggacatgcaagagtgaatctgttatgttatttatcttattccatcagatgtgctttgcgtggtctgttttaatgcatagaacttactggcatctcttttcaacaatgacagaagctatgaccccatattcactccctatgcttttttaagtcctgtagattccctcttcgacccctgaagacacagtgctgtgttgctcctggaaaaatgttgaaaaggactcataacaaatattgattcaaaatgaatttgtggttttagagaagaatatattgctgagattgctttttaaaatgtaatttgcagtaggtttacctcctagtgaattccatggcacctcctgaggcacagttctcattctaaactaatatattttttaagattttggtttacctcccataatgatgcatcctagctcaaaataggacttaattcatgtaaaacttgactggtataatttgaaagcccaatttctaaacttttaagtacattttgtgagcccttaaatttgccattcctctttatctaaagtggttttgtccagtgggcactgttgattttccctaaatcctcggagaggaaaagcctaagagctacactttctcaggatactttttatggcattaaacaagggaccgtttcattttcaattccaaccagcaggcatattttaggctctttccctatgccctataatactgtggaagaaagcatatagttaggtgaccttcagatctgtacctgacctccttccccattaagtgacatgaataaaacgttgtttgctggcagagaaggtcgataaagtatacgcttaatctccttccatggaaattagtgactttgaagccataactggaatatttttcctcttcttttcttgtttagcttctgtgtccttttttcttatattttctagcgtataaattctgtggtctttgacttgagatttttgggaaaagtgcaagtaagacatgagtaatctattactatgggcacagattccccaatggtcagaactggcaaagtcaaaatttctgttttcattattaaaattaatgaccctatatcatatttaggctcctcttctttctcatagaaatgtaatcttgggaaagaaataataactataaaccaaggtgtatattatactatatttgaacatcatctctagattacgtatgttttcaaagacatttttatgctctgaaagctgtgggtttaatgtactatatgtattggcatcaggggaaccaaaatgaaatatcagtttgatttagtgttgctatggagaatgttttaatgtttcaattcaatagtttgtaatatatttaggcatgcttatacatgtatacttcagcagatttctagtttggtgaatgttttttaattgactatcaggatttaataatagccatttgaaataaagccaataaaacaaaaaaatacacatttcaatttcattttatgactaggctttctttaaaagagttgcacactttttttcttcatagaaagcttttcttgatgttttctgatatgtccactgatggcattcagctttcattctttgatttcctgtcttcgttagttggtgtctataattgcttgggtatgggatatcttggccggcaatttagttacatctaattatcaagtcacagatagaataatatggctgtttcacacagttttgttctgagtattatatgctcttatcctggcttctaaggctttcttagagcaggactaactataaatatttggttgtaaaagttaaagaaagaaaggaaaacctcaagagaaatggacggcagctaacatccaagttaggaggacacccctgattttctcaggcttttcaacttttatctggaaggggaaggggaactcccaacgtgttgaggatttgctcacagtatgctaatcctgagatgatatccgactacagtataatataggtcttggtttatattcaactatttcgaagcgtctcacaacagccttgcttaaaaaaagactttttaacacagtgggtttttaatattttgttttgaagatgaaggtggttttctggtgattattgcagctggtgttctcattgctagtgatttccacctgggccctaccttgagctcaataacagttcacctggcaaggttggcgccacagcttcaagtggtggctctcacgtctagttgaatattagtatcactggtgttggtagtcatttctaagggctgctgtgccaaattatcacaaacttggtggcttaaaaatcaccggaatctatcatctcacagttctggaggccaaaaatctgaaatcaagatatggacagggccagactccatgggaagtcttcaggggagcatacttccttgcctcttcgagcttctagtggctcctgatattcctaggctgtggcactctggctccaatctttcctctctttccatgtgatcttttcctctgggtcactgtgcccaaatctcccagtcctttctctcataaagataccagtcattggatttaaggctcactctaaatatggataattttgacacaggaagtggaaagaaattatttaagcagatagtaagggtaaaagagttctcagcagaattttctttctaatgaaaagcatcccaagaaattatttttttcctaccaaagagcagcctgaaaaatcgagctgaaaacataaataagcaagctggaagcttgcacaggggaatgctggcagctgtgctaacagaaaagggctacctggggcccaggcatgtccgacatggaggctccatcttccctttttttgttgttaccatatgtacagtaaagaaacgggcaacatggcacagctcagatagaggacgtgacagcataataaaagattagggtggaggcgaccagaaatttgcatcctatgcaaatggcaaacctagtcctaaccggtttttcatgccctatacaaatggcacacctggtccaactagtctttcaccctatgtaaatcagactctgcctcctcaccaggtatctataaaaccccctgtatttccctgtggaccggcaacccatttttccagaacccctctccccagcagagagctattctctttctttggcctattaaacttccccatttaacctcactccttgtgtgtctgcagccttgatttcctcagctgtgagacaatgaacctgattatcatcccagacaatgaggccgctttagtctcatctggagatttttaattaattaatccacaaagatcctagtatcaagtaaaagctaactcaaatcaggaagtgattttctcagtccagcctttggacttcactcctccagcccccatgagctgcctggatcagactgctaagactcaggagttcttggcacagccacctttgtgagccctcccaccccaagtcctctgtcttcccctctctgctattgtgtcagatctctgttaatttcagttatgccattttatctctagggaaatgagttccaacttccaaacaggcaaaacccaattcagtatttggaacaggactcatttggagacacagtgtaatgcagtgaatgaagcacaggctttggaactagaaaaaaatggtttcatattccttttctagacctttccttgataaggtctgagaccctacatgttttaacatctctgctgttggtgtcaatatcttattgtcaggattagagacattccacttccagattcactcacacggttgttggcaggactcagttcttctagggttgttgactgttggtctcagttctctgccacatgaggctctccataggtcagcttgccttgtctcatcaagcaggaagagggcagagaaagggtgaaaaggatgaagtcacagtcatttataaacaaatcacatttctatttgttaaaaggaaataactaggtccagcccacattcaaagtgagagaagattacataagggtgtgaatagcaggaggtggtgggctgattaggagccattttagaagctgtcaagcacagtactctttcccaaaacccatcttattttttctgttggaatatctcctagcatttctagcttagggtatgtgctgacttctcggaacacagaggggcctggtgtcaaattggaatgctgaagcataagaggttaaaaagttggctttggaaagccacgcatagcatcagaaacagtattgtgataagaaccacaatcagctgagatcctggtgggtcattatatcgtgaattactttgctacatgattacacatgaactatagagcttcagaaataaaccactgtagtgggccaggagggaacaatatgaacagtcatttagaatgtgctgctgcagagagaataactaaatggcagttctttgaagccactttgctaaactatagtttgtatatctgctgtaatggttccgtgtaataaaccatagcagctacactctcattccttcttctaaatacccggttctgaaaccaccatttcaagaggatattcttgggagaacacggaacatcatttctaggcatttccatttctacataattagaatagaaagactttcaagtcagcttcaggttttagcttgttatataaataagttcacaggaatctcaaatgctttacagaaatctgacagcaactataaaaggcttttgaacatttttgttgccaaagtcctagggattgctggaatcttaaatagcccgttttaagctccaattcagaagctttttgtcatgtttaataatgtggtgaataattccttttctgttagtcgtttcctcttttataatccacaaggatctttgagccatggaatggatattttctggagctataaattaaaggtcctttcgatcccaaacttaaaatggccttttaatgtagcacttctgtaaatccatttatctaggtctaaagattcattaaaatatgtttaaatgaaagtattatgtaggtatatgtccaatgaaatgagtgatcattttgaaatgagagaaccatggagaacagatgttcctgtgtacagtaggaaatttaataggaagaaaattatttgtagagaatattaaatactagaatggtcttcttattcttctttcctcctctttcttttaaagtaaattaagtttagtccagggtccggtgaaccccattgggtttgtggagagtgtttatgaaaactttaaacttggattaaaaaaatgatatcttcacttacactaacctctgagtagattttagcctttctttcaagtgtgaatataggcaaaagaccacggtggcattggcagtacttgtgactttctcaccaatagaaatcacagatactgtctaatcatatttcagttattatatgtatcccaaaacatttgtgcttatcattcctttgaagatatagttgttaaagcttccattgggtttcattgtataatgtcttaataaagaaacaaatattagtgtattacatatattttaaaatattttcatggctatgttctagtataatctgtattctcataatcctatgtacttttttttaaaagtatgatttttggaagttgtacacagacttcatcaggtggccaaatggacccaggcatgtgtgcgtgcacacacccacacccccctccacacacacacacacacacacacacacacacacacacactgtgccagaacctagaaaacagaatgattaaggaggtttgcaattcgtggagcaagtgctggaccacagtcactttgaatacatggtgtcatttaatctttccaccaacattgtgaggtagaagtcattattattctcattttatagatgctggatcagagactttgagggcacggtagccagccttccaggtggcttccagtgatccttaccttttaaaattctcctcctagtgacatctcctcccaccttgtattatgttacctctttgaccagtagaatacagtgaaagcaacagtgtgcgtcttcagagtctaggtcataaaatcttactcattttgggaaaagctagtcaccattttgtgagaacacttaaacagctttatggagagcttcctctagcaaggaataaagtttctttccaacagccagcgccaacttccagccttgtaagtgaacctgaggtggatgcttcagcttcagccaagtctgcagattattcccaacctggtgggtgttgtgactccggtttcccagagaccttgagtcagaaccactcagctaatcagcttccaaacttcatgacctgcagaacctgtataagatactaaatatttatggtggtttgaagccactgaattttaggggttaatttgtcaagtagcaatagataactgatacagaggggttatgtatctttcccaaggtcatatcagtagtaaatgaaagaggctggatgggaacccagctggtgctgatgaagtgtgtgcagtttccctcagcttacctgcacagagataatcagagaaccctgaatcctttcttttccttttccttctttgtctccccatttttcttctctcttcctctcatgctatatgcacataatacttgatgatgagatggtaggtcttctctttccacacttgatccccttaaattcttaaataaaataaagcatatcacaaaaacaccaggtaaaatttattaagcacttaatatgtgtctcaaacagtgttctaagtattaaaagcaatactaataaactgtcatatatgtagtactctcagcagtctaatgtcagaagtagacagaaattttggctgggtgtggtggctcatgcctgtaatcccagcactttgggaggctgaggccagcaggtcacctgaggccaggagtttgagaccagcctggctaacatggtgaaagcccgtctctactaaaaatacaaaaattagccgggtgtggtggcgcacacctgtaatcccagctactggggaggctgaggcaggagaattgcttgaacctgggaggcagaggctgcagtgaggcaagatcttgccactgcactccagcctgggtgacagagcaagactctgtctgaaaaaaaaatggaaattttactttgtcttcataataaacttaacagataggtagggagatgatattgttgcattttatagatgatctgactgagttcaacatttaaggaatttgttaacatgacatggttttttcggcatcaggaggaaaagtagaacctgctaatatcaaaatattaaaaggcaaaagaagggtcatcaggctaattgcaacagcatttatttgaagtaaagccttctctgctctgtagatataaaaatatctgaggccttaacttttttttgcagggaagagcttgggtgaagaccatcttacatttgaatttatattcccaaattggagggaagcaatgtgcatgggatggtaaattgatctctggattattgcttgacctttcagtgacattaaaatgaaagaaaactgaataaaatgatatagctccacagtgttctaagcccattgatacaaaaacaatttaaatagcaaacaccgactttccctgttgctcttgtctgatttttaaataacattttcattatggttgctatagtagattaagctccttgttaggaggaaaattcagaggccactctgtttgagataaaaaatgtttaaacttgtaaatatcactgtgagagaaagattgggtaccataagagttactgtaaattacttaactgatagcactaatattgaaaatgtcctctacaagtgcttcttttaaaaattcaattcccttcaataaaatttgcatacttccaagggacttagaattctgagataaaagatacgtaagaataacaaaaatacatttgtttgagggaaaaatatttgcaactcatattatgtacatagggctaatgactctaatttattccaagtttctaaaaaccattatgaaaatgatacaatagaaaaatagtcaaagaatgttgtggcataattacattttccaaaagtggccacacctgcatttctagttcattgtggtgttccagattcttgtcatacactatcaggaggtggagtctgttttctcttccttctgttgaaactaggatagagaatagagtaggatgcactcagtgcaggtggagtgaatagcattcacctcatgcatgttggtgtgtgctccccacccctgcttcctccccctctacacccacttaccctctcctgggatgcttttctttggaatccaacagccatgctgtgagagaagccaaatcacgtggagtggctagccgtgagttataagagttctagttgatggaagaaaataattgaaatgtatctagcataaagaaaagacaaatatttaaggtgatggatatcccaatgctaagtaatatgaatgtattacattatcacatgtacctcaaaactatgtacatcgactgtgtgtcaatttaaacaataaaatttaaaaaatagagttctagctgacagtctcagccaagatctcagctggcagccaacaccaagtacaagactttctcagtcttcttttaaagtgttcaaactggttaagttaggcccacccaagatgatttcctaaaattaaactcaactgattagggactgtaattatgcctgaaaaatctctttacagcagcatctagatctgtgtttgaacaagtggggagggactgtagttcaccttagccaagtagacaagtgaaaaatccatcacaggctttatgaagattaagaaaatgtcataatttttaagtctgccgttcattattcattttatttatctcactcattctataatataacttaaaaatgtacttttatgggtggctggcagaccactggagagataattcatggggcataaacctatttttggcattactggttatgccttacttgagttaattcacctctcaaaacattggcaaatgtttatttttttaaaaaatcttacacaggtgcttggtggagtgaaaaatactactttctaagggttaatatgactataataaaaatacagaataaatatataccaacatttaatatgtctttaatgaagaaaccagtgcaatccaggggcattttgaggacctgggtacttctagacattttgttaaaaaggagttggagagggagaatatttgaataaaattactaggttttatacaagactgattagtatcccacaggacaattaaaccataaacttcagtggttctttcgtactagacaaaaactacaagttaacctataacttgacagtggtggtacaataatcaaaatgtatatagcaaagccaaacacagatatgttcttttagagaattaaataatccttgagtgggcttggggaacaaaattctagtacagtattgaacagacacgccacatacaccattgctaccactactgttagctttatttcctagtttttgatcatttttgttaaccagggtcatattgactttgagtcataatatttgctaccatgaaattctttaaaaagtccatgcgttatcttagaaacattatgatacataaaaaaatgggaatgtctcattcttcagattactcggaaacaatgggtgtaaattagcaaagaaagtgagaaaaataaattaaaaaagtgtagctctttatgtaagtatcttatcagtaccatgtttcataacatgatttctctcttaaaatagtgaaaactcatggtaaaactaagatgacctaccttgtaaatacaggcaagtgggataggtttcaggattaactcaatagataaattggaaattagaccttatctgttaataacttcagttctcctgctgccacatactatgtttggaactgtgttcagtgaggatattttgtttgcattcacattttgtctaatttctagctgaacgtctacacctcatttgtctttacatttaccatttgccaatgtcacacattgtactgttacgattcttaaatgtaagtgacatccattttcgagaaataagtgtttcattcatgaagggtctttttaggtttatgttaagtttgttctcattttcagtttgctcttcagacaaatagtgtaatatatactgttcttcttccttcttattgaatattttctactaaacctatctttttatgattctgaaatgccagcttcagttttttttattaattcatactgaccctgggcagagctgtctatctcaacttaatggctatttataatatatggatggcattcccctgccattaatgtttaatgaactggctcctgatccaatagagtctaataaaggtaatcactagaatacattgtctttctgcagtgccctagaaacttcttttattttccctattgtatacctttggcccatagtctcctttttttacctctttcggtgcactcttctcaacctctttttcattatttagtccaattgcatacatttttacacttaatttctttacaggtcaggaagacagtcttctgagtggaaactttaaaaaataccagccttacatgattgttagaaagaaagaaaaccttaaatactgacaggatgcagacttatttacatgtagagtagaagaaaaacatttttaaaaaatctaggctgcttcttacagaccgtatccctagtggatcaattctttttttgtaatctacatttgagatgtgttaaaaacaaaattgggtcctggaattagataatggtgatggatacatgtttttctgaatatactgaaaagcattgaattacatattttagaaggataaatgttatggtatgtgaaaaatatatacctatgctacattaacagttacatatttttaatgatatgtattaatatatattatatgattttgtcacatataatagcatatataaaacattggaactggatgacttgagggagcaaagttgagcatttcctgatactacaaacatgtatgtgtgtgtgtatgtgtgtgtgtgtatatatccctgtttttcgctctcctaaatcagttctttccagatttccagtgaaaggaattttagcttgcttatgaatgccatctaattagtttatttctttgttactggagaacatgaacagaggccgctatttactcaagtgtgcactctccaaaggtctttcttcattcaggatgacttgatcctgagggttctgccatctgttacctctaaacagctagccagctgctctctagtctttccagtttaagctccattcttggaactgcacttatttcagtctggttgttgtattcaccttggggctctgtattcctgaaaccatggactgctgatatcttagcagccataagaatcttcctacttgtttgaaataggggtttctggatccagagcctagagatcatcctaggtatgttttctaagatgtactttttaaaataaaattaaaatactttattttttagaacagctttagattttcagaaaaattgtgcagatagttgagagacttaccataacattttccttccgtgtcgccactattcccccatccccgccccaccaccaagtgtctcctactattaataccttgcattagtgtggcacatttattactgaagttaatgaaccaatattgacacatttatattaactgaagttcatactttactttaaagttcactcttggccttctgtggttctatggagttttacagatgcatattgtcgtgtatccaccattacagtttcgtatagaatagtctacattgccctaagaaactatattggatccctggtaactagtaatccctttattgcctctatagttttcccttttccataatgtcatatggcagtatgtctgtaaggtgcctccacacctttttatggcataagagttcttttaaagaaaaaattgtagactagtattctgtcgtatggatttgccacagtttgtttatacattctcgtgttgtgaaagacagattattatgaataaagtttctataagcttccctaagcagacttttgtgtgaacattagttttcaactcagttgagtaaatgcttaggaacttggttactgcattctgtggtgaaactatgtttagatttataagaaactgtaaaactgtagtccaaagtggctataccattttaccattatttccaccaacaatgcatgaacgttcccatcactccactttcttgccaatatttggtattatcagtcttatggatttagctatcctaataggtatatactggtatgtcattgttttaatttgtaatcccctaatgacatatgatgttaatattttctaccattctgtgacttgtcctttcattctcttaacagtattttttgtagagcaaaagttttaaattttaatacaattcaatttaaaattttttttgtagataattttttgttgttatatctataaacaaattgccaaactcaaatctagtatttttccctgtgttatctttcagaggatttacattttgcatttttcattttacatttagttctgtgatgcgttttgagtttatttttgtaaaaggtgtaaggtctgtgtgtagatcccccctttttttttttttggcatatggatgtccagttattctagcactatttgttgtctattgaattgcctttgctcctctgtccagggcaagttgtttatgtttgtattggtctatttctggatttcctcttctgttcttttgattcacttacctattctgtcaccagtaccatgctgtcttgatcgctgtagctttgtagcaagtcttaaagttgagtagtatcactccttcaactttgttcttcaatattttattggctattctggatcttgagcccttctctatgaactttacaatcagctttttgatattcacagaataactttctgggattttgattgaaactgcgttgaatgtataatcaagttgggaagaaccgataacagtatcaagtcttcctatccatgaacacagaatatctattcgtttatttagattttatttctttcatcagaattttttatatttccttacagatcctgtacatatattgttagatttttacatctatgtgttttattttttacgctaatataagtgatattgtgcttctaatttcaatttccatttgttattttctggcatattggaaagaaatattttatcctgtttttttcaggataaaagaaaaattttatcctgtttttttcaggataaaagaaaaattttatcctgtttttttcaggataaaagaaaaattttatcctgaaacattgctgcagttgcttatttgttctagagaatgttttgtcaattttttaggatttttctacatagtcagccatatcatgagagcaaaaacagttttattttcttcttcccaatcgttatatctttttcttaatattctttccttttcttgtcttacttttacctaggtcttccattatgctgttgaataggagtattaacaggggaaaatcttgccttgttctcagtagcttgctatatcaaattattacagactggtagcttcaaacaatagaaatttgttccctgacagttctgaaagccagaagtctaaaatctaggtgtcagcagggccgtactcccacagaagctgtggagggaaatccattccttgacagcttctggtagctccatatattctttgggttgtgggtgtgggtgtgacagtgatctctgtgttcctggtcacactggcttcttgatgagtctgtgttatttcacctttgcctctaccttataaggatatttatgattgatagcattaaggcccactcagataacttagggtaatcttctcaccttaaaattcttaatttagttacagctacaaagtcctttctttcaaagaaggtaacattttcatgttttaaaagttaagacctgatatctttgggagatcattagtcagcctactatactacactgatcttaaagcatccagtttctctccattgagtatgatgtcatgttagctgtaggtttttttgtagattttttggtatcgagttgacgaagtttcatctattcctagtttgctgagagtttctactcataaatgagtgtgggattttgtcagtgcttttctgtatctgttgctattatatgatttttcttctctggccagttgatacgctaagttacgtttgttgagttttttttgttgtttggttttcttctattgttttttttttttttttgagacagagtctcgttctgtcacccacgctggagtgcggtggcacgatctccgctcactgcaagctccgcctcccaggttcacgccattctcctgcctcagcctcccaagtagctgagactagaggtgcctgccaccatacctggctaatttttttgtatttttagtagagacggggtttcactgtgttagtcaggatggtcttgatctcctgacctcctgatctgcccgtctcggcctcccaaagtgctaggaatgtttgttgagtttttgaacgttccaccagctgtgtacctgaaataaatcctagttgtagtatataataacttttatacattattagatttgatttgctaagattttgttgacgctttttatatcatgttcacgagcgatattaatttctagtttttctttcttttaatggggtttgcacgtgtattctgattttgctatagagtaatgctggtataacataatgacttaggaagtgttccctctgctttacctatctaaagaaggttgtagagaattgctatcattttgtgcttaaatatttgatagaattcatcagttaaattgtctggacccaatttattatttatttttagaaagttaattattgattcaatgttttaaaaagatacagatatagatataacctgaatagacctattcagattatctatttctctttttgtgagttttggtagtttgtttcttttaaggaattgcctctgtttatctaagttatcaaatttgagatcacagagttgttcatcatatttctttatcatctttttaatatccatgagatcagtagtgatgacccctctttcatttctaatgttagtaatctgtattgttgctctttttttcctggttagcctgactagaggtttagcaattttattgatcttttgaaaataattagcttttggttttgttaatttttctctgattgatttcctattttcaatgtaattgatttctgctctaatttctattctgtttttcttctgattgctttaggtttaaattgtttttctttctgtgggtttctaacagaagtttagattattgattttagatctttcttcttttttgatatatgtgttcagttctttaaatttcctgcaaagcattgttttccttgcattccacaaattttgctaagctctattttcatttttatttagtttaaaatagtttaaagtttatctttaagaaatttctttttgcatgccttatttttgttgttgaaagctggaaataatacctcgagtgatgggaactaagaattttttttttttgttatgaggttttatgttaatctagcttagagctggactgtgtttaatgcttgctgtagctttaagtgccagatgcttctgtgtgctcgtattttttgtcttccctgttgtctttgggctttcctaagagctccttattcaatagagtctgtgtgtttcacctctcagttgtaatcaccaaagccctcttcacgtggtgatgaggtctcaggaaggataattgttgtatattatgattacatctcagttttcttagtgagcctgagtttctaggctgcgatcttctgaaatgttctgagcccttttttcgtcccctgacattagacaggaaggctaaaagagtctggaggggactaattgcccttctcccaagtcagatagaactctggtaaaatagcttccctgaaaggacgtgtctttcttacagagaacaatctgggaaacttccaaaatggttactttttctcttccctgagatttttctccagacttccccatgagaacatgatagggttcttggagataaaactcacaaaagtatagtctcccctaagactaggctgcaagagtttttaactctcaagctagtctgcactgagcctcaagcaatttgtcaaaattatcatacacgtgttcgtatcagttcctaggtccttctgtttttgctttaggtaatctgatcttatgattctttgtgtttacatgtttctccaaatttggggatactattttgctttggacctcagttctctgctgaatctaaaaaagtcattaatttccagttggttcatcttttttccttgtcgtaaatatttttcttgttgcaaattgcagtgaagcagtgtcattggctgggataatatccgagatttgtcatctcatgccgggaaaattaaggacagggacacacacacacaaggagtgagtttgggagctgaggattaataggcaaaagaaagagaaaggagaacagctttctctcttgagagagaaaagggtgcctgaatgagacttccagcctgtggcagagtgcattggagtttataggcaggcttgaggaggcggtgtctgatttacatagggcccaaagattggttggacgaggtgtgatgtttacataacatgcgaggaagctggatgccctaccctgatcttaagcaaatggcgacttctcccagctggcgccatgttgcctgctcgttactctacatgtggctggcaaagaaaagggaagatggagctgccattttgagcatgcttagtaccaggtagctttttcttattggcacaactgctggcattcatccattgcaagcttccagcttgcttgtctgggtctgcagcttgattttacaggctgctctttgttagaaaagaaaatgatttggcggctgcttttcattcaaaggaaaaccttacggaggactccataccctcactgtctgctaaataattcctttttaacgcctatatctgcagcttccaacttctttatatgtccctcacaaaacatttttatgcaaatggttaaaagagaaaaccagatccagaaattaggaccattaatatgaaaattgaaattttaaatgttttcactgctttcttgccgaccaccaggacttcagcaggtaattaagatgtcagcaagattttttttaagtaactgaaagttctagctgctgtacttatatactttggatgcttgtccgctccaaatctcatgttgaaatgtaatccccattgttggttgagtggcctggtgggaggtgtttgggacatgagggtggattcctcatgaatggcttggtgtcatccttgcagtaatgagtgagtttgttctcagtctgtgagttcacatgagatctggctgtttaaaagaggctgggacttcctctactctctctctttctccctctcttgccctgtgacatgctggcttgcctttgttttctgccatgattgtaagctccccaaggccctcaccagaggccaaacagatgctagtgttatgcttcctatacagcctacagatccatagccaaataaacctcttttctttaaaaattacccagtctcaggtattcctttagagtaatgcaaagagactaatatatatgccttttgcacctttgaaacagaagtttaaaaaatatttttatgattcaccttgttcgctcgtgacacaaacactattgaggcatctccattggctgaggccagttctctcaccaggtttatattttatagactcttgggttctgaatgagtactctgatatcttttgcaccttcagcctcctttttctcagctttgagaaaaacgcttgtgtgaatgcctggtcttttcacaaaataagcagagtattttagacttcatctgctggacttcctctgtctccagaaggaaacattgtagtataagaaattacaaaaacaggccgggtgcagtggctcatgcctgtaatcccagtactttaggtggccgaggcaggcggatcacgaggtcaggagatcgaggccatcctggctaacacagtgaaacccggtctctactaaatacacaaaaaattagccagcctggtggcgggtatctatagtcccggctactcaggaggctgaggcaggagaatggcgtgaacccaggaggcagagcttgcagtgagccgagatcatgccactgcactccagcctgggcgactgagcgagactccatctcaaaaaaaaaaaaaaaattgcaaaaacagattctcaaaactactgcttaaacttatcctattggtcagcttgaaggagagcaataattgctggatgttctttaatttgtagaaactggcttaatttgtgcacacataaaaagaagtctaatttcacaactacagattgcaaggcattattgtgtaggataggactgatgccgaaagaccacatgagaagatagaatatcagtttagttttagtaactgactctcctttataagaactttgaccctctgtaatactatagaacaaaatcttctttcctaagtatgcatttattgatcacatattatgtgccaaccactgtgctggtcacaggtgtgtgtgtgtgtgtgtgtatggcattgactaagacaacatctgtgaactcaggtttctgtgtagtggatataagatgaatgcctactgtcaactttccacaagactaccggaaaaacctgttgatcaagcaaagctatgattttagatctataggaaaagaatatacaagattgagagaatctgattagttgctcaaaatggataaattaggagagcacatttatggagttctgggcttgttctgcattactttaaggcaggtactgcaagtcagagaaatgattggaattggacaagagtttagacaaagtagtcttgtgtttgtggcacagagagggtcttgaaataagccctggtgagtaagctgatgaccttgctaagtaagttagttgattcatagtttttttttttttttcttttcttccagaaatatttcccagagcagggagccaagttgtcagtaataatgaaaacagtaatgaaaatatgcctagttccaaaattttcacaaagggacaaaaaatttttctagttatcacaaataaatgaacttgaatccttaaaatatagccataaggagtctttaaataaaatgcaaaaatctttattaaatgaatgaaaagaaagtttctcttccttgagactatcatttttaaaaaacagataaatgtggggaagtttattttgttattctaacataattctgtttgggaatgaaaattaaaatagaatttttttccctaaagcaaagttatagaacttcctattgcaattatccatgctaaatttgctgacatgagtgttttcactaaagtcttcaatacataggctgtgctgggaaggtctgggccatacctactgtctggctactaaggccatgaatctctcttaaagatgtgttttgtagtagacctgaacagactcattttagtggagtccaagagactatatcttctgttttaatagatttgttttttctcaaatttttgaaaaaagctgtgctaccaccttgaatttggaaccacttcttgttgttgctgttattgctatgggcatgtttttgttatagacaagtttttgtttccatatcattgtaaacatagcttatgacacatattctcaaatgtgcaaagaaaagtataatgtttgagcttatacatccatgtagtaagtgtggatcattcattccatatataagatacatttttaggtaagcattcaggtaaagggtattttgtcatttcgttcttcaaatatttattgagtgactgatatgtaaatggtgatatatatattaggtgttaaggtgttagggttttggagttggggatttagtggaagagagtggaaccagtgcctgccctcaaggagtttataatctagtgaggtagagaaatgttcaaccaagaatgagacacataagttagtattagagctctggtaagtggtgtgaaagagagttatctgatattataaaatcgtgtaaccctgtataagatgaactttcaagctgaactgagagtagaaggcagagatgataatgaggcagagtgatttaagtagagaaaacagatatgtaacatccctaaggagaaagaactagaagtcaaaggcttatcattactgccaaaatgtaatttgtcatagttgtgttctttcaattgtcttcgttaaatattaattattttaataaaagttatataagtgcattttaatatttaatctacacaaagatgagatacttttattaatttctgtaaatgtttcagaacattactttttctgtgattttaaatatttgtgaaaactctttcaatctgtccttcaggaagactcagctctcatctacatacttgccaatagaaatagtgttttcacgttaaagaaacaagcttagaagttaggaggtaccatcatgttaattgctgccttgtaatggttatttattgtcattttgtttattgacagtgactagaatagcagtatgatcagcatgatcattataaaaaataatgaggcttttttcttttttttgagacgacggagtcttgcactgttgctctggctggaatgcagtggtgtgatctcagctcactgcagcctctgcctcccaagttcaagcaattctccccctcagcctcctgagtagctgggaggacaggcacccgccaccacccctggctaattttttttgtatttttagtagagacaggatttcactatgttggccaggctggtcttgaactcctgaccttgtgatccacccgcctcagcctcccaaagtgctgggattacaggtgtgagccaccatgcctggctgaggctttcttttaaacagaagaattacacttccaattcaataaaatttcctctagaagagaattggatattaattcaaagaaatacgaagtttttattttaccctatgcttatgtagaacattagagaattccccaaatctctaaatcttcattttccaactaactgaatggcagtgataaaatttcctgtctaagcaaattatttctcaccatagatgttctctttatgtaaatcttgcattttgagcctaatgttgtaagaaaccaggtctgatatgtgtagtttttactaatccattgtttaccttgttagagaaacagtgagcaggttagctacctaggcgaattgatttgaatggagacagaattgttagacatacgttaatttgatagcaccttcaaggaccaactcaagggaggcctgatttaccctcattgacagtcacttgcttttgttagtagtggatgcaggagctatcatgtttcattctcaaaatcacagtatccgtttgcacacggaaaggtggaaggaaggcctatgcaagtgtctgttgaggcattttcagctggaggtctgtcttgatttgtagatccacttccctcttaactgagttttaggattacagttctaacatttctgtgacttcaaactcagtttgtacagaagtggccattcagtgaggtcctcatcctcattaatgttcagaacttcaagagtattctttgattagttttgggagtcctcggtttgtccccctttctgtacctcaagatttgatatgttttcacaccgggggaattggtagagtatcattaaaggattcatcattactgcttcctgaagataccctgtgccccagatagccccagacacacactgacttttctgacatgtgatgattttgctgactataatctggtctctatctctgcctttgcagatcttctatataatttaaggcccagcctatgtgtccctggtctatgcaaccttccatttctctcccatcctagctaagagttgtgttcctgtcttctgtaccttcagcctcatttctagacatacttgttaaattctgcttcatattggagttaattgtataaataccacttaactctcactcttaactccaaagagcaaggttaaaattgtgtctggttttgtgtcccgcagagcatgaaggatgtgctagaccatcagcaagccttcatgagaggactagaatacgggaggcagtactgcagcgtggtgtagagcttgagctctggaaccaggctgcctctgtctgcatctcacttcctccagttagtagtctatgatcttggacaggtctctgtgcctcagtttcctcattgggttgttgtgagggtttaatgaaacaatgtacataaagcacttggtactacacctggagtttggtaagttttcagaaaatgttaacaattatggtcagcaattcagaagcgcatggagcctctactatctgctcttttatacattcacagatgttgagtattagctctgtgccaggcattatgccatgttgagtctgcaaaaatgaataactatcttcataacatggaagggaaggatcaataccaacaacagaatgcttagtataggacttttttatgacagtgatgtgttgaagtgaatttcatggtaatggaaagcagatgtgccatacattgacctctatactttccgtgcacttgatagtgcatagagacagcagtactaacatcaagaactgaaatttttagattattttgaatctccagttcaattagttcctaacttgttaatgaacaaatccattatcagagatgctaatagggaataacataagctaaggttttactttcttgtctttctctttgtctatgctaatgggcgtttattttattttattattttttggagaccaggtttcactccctttccccaggctggagtgcagtggcgggatctcagctcactgcaacctctgcctcctgggttcaagcgattcacctgcctcagcctcctgagtagctgggagtgtagatgtgagccaccatgcctggctaatttttgtagttttttttggagagacagggtttcaccatgttgaccaggctggtcttgaactcctgagctcaagagatctgcccacctttgtttcccaaagttctgggattataggtgtgagccatggagcgtggcttctgtgctaacaagctattagtgacttcaaaggtgggcagcagaagttagcccccaaatagcagcagtccactgttatgtagattcctctggtaatagtcacctggaagaaaatctcctataggtccagcataagtcctctattactgatttcggtttatctagtttgagacctttgaaagttgtcttttaatgccctttctatgacctattgcaagaagatcattgtcagtctgctgtgcactgtgttttaacagcagatatggctttctctggaaggataaaatccttgccggtgttcctccccatggttctttgtagattctttctctttttgccattaccttcttcgccccatcccgctttcacacttggaaatggccaaagccgaactaatctctgaaactgaatattagagctctgcctagaatcttggcccatttttatttgagcttttttcctacctcatttttgctggaaaatccttccatttggcttttaataggggtcatttgtgaacaatatttcataaccagttacagatttcaatcttctgcatgtgtatgataatttatagtccaagtgcttttatacttgaacatcttttatgagttctactgccttttccctgaaaggaaactgctttcctcttcccatattgcaggtaaggttattgaggcaaatggactggtgaaaatgtggaatctgttttaaaaaggtagaaccatgtcactgtgcaagtaatagaaactcaaagtaactttaaccaaaatagggattgtatgtgaaggacacaaatgtgtctctcactgcagcaggaaagagagagggcaacaaagcctcactgggggaggcaagcaagaactgcagttgtggtcggagtctgtgctttggccttctttttctctgtttgctgccttctgtgctggggctccatgcgcctgcgtggcctggtctcttagaccactgagtctctgtcacctgacttcgctgtcacaacagatacaacctcatcccatgaattctaattccaaattctctggactgagaatctgattggctggcccagtgtagagtcagatacacccccttggtcatgttagttctggcgtcgtatgaggcctggtcattttcagagaaagctatgggcctgaatagatacttaaaagaatcttctaaccaacccatgagtttataactaattacaaggtcagcaaatgttcacccataggggtgtaactccccattttttatgacccgaaatggcagttttttaaaatgaagttagacatttctccctcaaagttcctgtaacacttacagattcctttcttaaactcttatttgttccaacatttctatctgcttcactagactgtgagcttcttgaagaaaatgaccctgtgttgttcagtcttcacatactcaatgcctggctcaatgctaggatattttaaatgcttagcaaatgctggttgaatggagaaatagataaaagactgcctacctcaaaagatatttctttgcactcccacatttttaaaatttttgtgtttaagtcatacacagctaaaagataactgaggcaaaaatatctgcctaaagcgataagctaaagcaacttttgtgttctcaggaagtagtatcccatagtgcagtcataactcactggaaaataccaagatttctcaaaagaacagccagcaggtgatccaggacagtttagcttctggtcagtaaaagaaaactatttcaaatggaaagaaattctagatttcaaatgaatggacaggaaaactccagtgattaactacatcaaccaaaggttcccaataaggttaaagacgtagaaaactgaaaatatcttgatggctcatacttattcctttaggtgttcttcttagttcttattttttactttgaaagttttaaattaatcatttactagtttttgatggcttccataacagattactgaaaacttagtaacataaaacaacaaaaataaaatcatttaacaactctggaggccagaagtcttaaatggctctcactgggctaaaatcaagatgtcagcagggctgtgtttcctctggaagctctagtagagaacctgtttctttgacttttccagcttctcatggccccttcctctatctttaaagccagaaagggcaggttgacttctcacttttcatcactgtgaccttctcttcagcctgtctcttccatcttttaaggacccttgtgattatgttgggcccacctagataatccaggatcatctccctgccttaaggccagcagattagcaaccttcatcatctgcaaccttaatgcccctttcccatgtaagcatattcagaggttctgagtattaggacatggacatctataggtggccaggattctgtcgaccacacctacacctactgtgaacacagatactatggaggatataaaagtaaactatatatagcagtcacaatcaaggatgtatactggctaatgaaaaagtcaacttcacataatgtaaataatacataattgcaaattctctgtctcaaaatttccctttcttcttactcaataaatgtccagcttcctggtctctgactgtgccagtcccaagtcatgttgcctagtccaattttagggttgcaactagttctgttaacaccttaatgcaacacattaggatatacagccataaacaagacatcaggttttgaatagacaaatgaactgctatgaatgaactatgcagtaaagtgatttcctccaacactgttagtaatctaatctgagaatgagaagtgaaaattgcaaattatcccaacagtacatcatacttaacgtcctcagcctaaatgctataggagatagagattattcagcataagaatattatgctaaaaactcaaaagttcagactgcttttcaaggagttgaagcagtagggtgttaatgcctgaaaagctttttgtagttaccttgtttgcccatttagacttcaagggcaagtttgaggttctatgaatgatatccacagtttgcatttaaatttgaaggttatttattaagtgacattttcagtaagatacaaaacctacctcctggttagtgattgcacgaagtcatttttagtgcatgtaagagagcagtgaatcagaatatttatagtttagcacttttaaaaatgtccttcaaatatgtgtgcacataatagcttcttagactatcaagtccaagttttacaagatttaggctgaatatcacacatcttcaataaatagttttgtattcatgtacgtggtgatcagcaatctagaaaaaatataattccagaaaactaatttgttaggatcagtcctagatcagatatttttattttacttgaattgatcattagtaaatgcttaaatatttactaaacgaattaatgatgtatacagtagaaaatgctaagtgtggaagaacggtcatatgttaagcacaaaatctcagactgggattttatagtggtaattgctattgtgttcagaggcccgtggagacctaggataaacatgctgcatcttttgaggaattttgcttatttgagaacaaagttaaatactttacctactgagtaatttaaaatatttttgtattatgacaaaaatcatattattgagaacacaattcacataacatttcttataatagcataatttttccatggtatttttataaagtatttgaaaattttcattacattatgcaatttgcaagcatttcccatttattgtgtgtgtgtgtatatgtgacctcatgtagccctataaggcttgttactaaaaaataattcaaaacccctacattgtccctcctccctctccctcatttcttttaaactgattattttagtatttatctctgtatctctaagtaatatgtatacttttttattttttacatttcaagctctttctattgattttgcactatggaagcagagaacataactaatatcactaatcttcccttcacttctattgcacacgctcttcttctgtcccttatctcaatgtaattttactgcaaatttgatgaaattaatattcatattagtacagtattgaaatgtcatctaaagctgaagtgtggagtaaactaccatcacactttctatcctgcctgacttttgatttctctggatgtaataattttcttgttttttaatttgcttggttttgtaaatacttatcactgtcttagcccccaaagtcttcactggttgtctaaataccttctcaagatgttcatgcacttctggtattctggcactttcatcttcctagagacatctctcctgcagccctgctctctcattttgctggggtactctatgtcagagaccctctattttactctctacaggaacaaagcttaagtcactggccaggatgagggggtgtcgcaatctcctggctatcaggagtgggagatgggatctgaggatctaactcctccttaatcctttcccttcccctgctcaaacatctttagagagatataatatatgtagcataccattcacccatttaaagtgtatattctgtggttttcggaacattatcagaattgtgcaactatcaccatagtcatttttagaccattttcatcaccaccaaaagaaaccccagatgcattagcagtcatttctgtttctcatgaagccccctccgcggccctgggcattatgattccattttatgtttttatatcttggcctgttctggacatttcctataaatgaaatcacacagttgtggtcttttgtgactggcttctttcagctagaataatgttttcatggttcatcatgctgtaatgtgtctcagtactttatttttttattgctaataatattccattgtatgcgtgtaccacattatttatcttttcatccatcaatggaaatttggggtgtttccacttttaggcttttatggatgatgctgttataaacattcatatacaacttttgtgtgaacatatgttttcatttctcttgggtgtataactaggagtggaattgctgggtaatatatatacctttatatatactatctttatgtatataataaattagatgcatcattttacatgatcacctgcaagatgtaagggttctgatttttccccatcattattaatttttttttagttataggtgaccttgtgggtgccaaatggtgactcatggtgtttagatcaccatttctctgatggcttttaatgctgagtatcttttcatttgcgtattggccatctgagtatcttgtttggagaaatgtctatttaaaacctttacccatttaaaaaatttgaatcatctatttattattgagttgaaaaagttctttatatattctagatacaagtcccttctcagatatgtgatttgcatatattttctcccattcctctttgattgtcttctcactttattaatgatgtccttcaaaatacaaacttttacattttgatgaagtctaatttatatatattttttctttgttgtggctgtcgttgcttgtgcttttgctgacatagctaagagacccctgtgtaatccgtactcatgaaggtttacatgtatgttttcttctaagttttatactttaaactcttaggtctttgatctatttcgagttaatttttatatattctatgaagtaggagccttccactcttttgtgtgtagatatccacttgtccaaggaccatctcttaaaaagactactctttctctgtttgcttaatgttttaagatatcagagctcaaatacatttcctgctgtgctaaatatgtctatatatgtttttcattttcagcatgtatgttccttctccactatcattgtgtacttcagcagaaatgttgggaaaaacttggtataaagaaaacaaactttaatagatatgcttcaaccaagaaggctctgggatgtagacttttcattgaaaggagccattgaagataaacaggagaggttcatattaagctagaggtccaggttaggtcgtgcattctcagtgggagtgatatcacccccaagccggtgaaaattaattcttgggagcaataaaaagtcattctttttatgtgtaaagcgcagacatagagacaatacatataaggatataaagaaaatctgtggtattaaaatttcaggggggcaattagaaaacgctccttgcagggatgatgatgaaaaaaagattgagaaacagtgaggtgaaagtcgcatttcatcacaattgccttaaaaattccttccttaagtggctcattaatgagtacatggttttgatatattgatatgtacttgaacattcaagaaccactgaaataaaagaaaggagaaaaggagagtccacattcaactccctgggttttgaagccattcctagcagagactttcgaaggacttctaaatgctctatatgcagtgtttgctctattgtgcttttatattaactctctattaactctcttaatgtattattgttagtgttattaggattaaataagataatagaaccagtaacttatagtgataaagtgctgtgtgtacagaagaggttttcaagtcttttcttaagttgagtatttctaatgataattttccactgtgataattttttctttttaagctttagcttttctagctactggtcttgttatatgtaatatgagctgaactattggtaggaaggctttatcagtgagtgcatggctaaatgtattcaaaatccttttatgacttgaatctgtccatggttttgactttgctgctttatcatgtctatacttgagaagtattatgtttgctcatcaggctactcctacatacagagtggtcctcagagaacattttcttctaggatttaagtgatgaaaagcaaggctgaatggagattttggtgaaaggcattctctttggatccatctctaatatttttctcccccactttggggaattcactggaagctgatgccacatactttgttgatggtacccttagctaaccacctcaggacataacaagtttaatttgaacagatcaaatagattcaaaggaaaaatatttaagatgattggtaaaattctcaacgtaaatctaaaatcttttcatttaaaaaaaaaaacactcactttctccagaccagtttcctaggagactgccaattattctagtgtgataagctagattgcaaatgaagaacttgttgaaagatgcatttaagctaaagactttatttctttagttttaattttttgatatcatttatatacagcaacacacataaaatttacatacactgtggattactgtagaatactgtcatcaaatcaataagtttcttccacagttttgcattccacctcctctctaccacccctggcctcaggcatccactgatctgctttgtgatgctatagattaggtttggctttttaagtattttgtataaatggaatcatgtagcatgtatctttttgttcctggggccttttctccttcttgttactgcatgtgtcaacagttcattccttttcattgctgagtagtattgttgcatgattatactacagtttgttaagtcatctgatagtggacatttaggttgtgtctactttatggctattatgaagaaagctataatttttcatagatgagtctattggagaatatgtttgcatttttcttggatgcatacctacaagtggaattactgagtcacatgctatatttaaagtcaaatttacaaggaattgccagtggtattctaaaatggttatatcagttttcactctaccatcaacatttggaagttcttaattgctgccaatccttgtcaacacttgatattgtcagtctttttatttcagccattctatttagctgtgtagcagtatctcatttgggttttaatttgcatttccctaatgactaatgataagcatttttttcctgtaattatgttttcttttgtacgatgtcattttgggtactttgctcatttttaattgggttgactatcttactgagatattagttattttttattctagatataagtcgtttattaagtatttgcattaaaaatatgttcttctagtctgtgacttggctttttatttcctaaactgtgcctttcaaagaactaaagttctttgttcttcaaatccaagtcttttttttttatctttttttctttgtactttatatgtactaagtcatataaagtacctaaccacataaagagtttatttggttaactctttaggtaagagattcacagctgggattgttttgccgtcagggaatttcagtcagttagctgaacaggaaatgtttatttcagcgtctaacagttttaggggtaaaaagagttctaatcttagctaatcaatcctgagccacagagtgggaaattggctagaggtaaaaagggttgggtctctttctggccttgttacaggtaaacaaaaggggtggtctgcacattttgtgaaaattatgatagagtaagaatagtcatatctaagtcatttggggaagggtagttctcttcagcagccatttcccagaaccaaaaagagtggggatgttttgcctttaattttcaaaaggtttgtaggggtggttgttaaccatcacttttctgcaagcacagggctcaggtaaagtttgacattgtcagggcctatttgtacttagattctttaattctttttgtatgaatacaccatgctactggttccctcattaagaaattcattttgatatgtttgctttatatttatctaaaagcaatgtttgtaactttttaaaaattatactttgacattctttggatcttcatagatgctgtaggggacaaaagatttttcatctgtcactagactcatgactgagacactatgacaaaagacagattaaccggagaaaaacatacaactttatttaacataagttttatgtgacacaggatcattccaaaatgaagacccaaagacatagggaaatgtacatgttttaatgttcagtttgataaagtagatggtaggggagaaatattataggaggataaaaggttatggtctaatggtaataaactgggctgacttgggaaggcctgtttgttcagattcttctgtgtccctttgtcttcagagagacagagatgttccttttctccaggtacagtgagagaacctctgaaatgggagtcttaatgatgtactgcagaggtcagagaattactgtatagtctgcttcagaggagaagggcaggaagaaggtccaagagaccttcttgcttctgctgtttcctccagtgccaaagtggggtgtcctgaacgtcatcagtaacgtacctattggtcaggaaggcacgtttacaaagtcaagcttatccattaaatatttcctcaatttaatttactatgaggatagtttctatgttgaagaggatctgacatcaggctggtttctttttagtatgtcttgaagtttattgtttcttgacttgtgaaaatcaacagggtctcttacaaatagactcccttaccataaactcctgaattttagacagtaaaataaatgtatcaacaggactcatgaatgtgataattatagtgtattttgatgattctaatactcaccgtctctgaaattaatacgttccttgcgattggtaccatcttaggtaggatgtaatatgatatatatgtcttttgtttttcttttctcacctgtcgtggatatgttactgggaagggtaccaatccagagcctaagaaagggttcttggacctcatgcaaggaagaattcagagtgagtccaaagagtaaagtgaaatcaactttattaggaaagtaaagggataagtactttttttattccaaaatacttttgtattccaaaaagtaaagtgaaagcaagtttatttggaaagcagtttgggctgctcaactgaaaatacttataattatttcttgattagatgctgaacaaggggtggattattcatgactttcccgggaatggggttggcaattcccggagctgagggttgggttcctcctctttttagaccatatagtgtaacttccagactttgccatggcatttgtaaactgtcatggctctggtgggagtgtgttttagcacactgatgcattgtaattatcatataatgagcattgaggacaaccagaggtcacttttatcaccatcttggtttcgatgggttttggccagcttctttacgcatctgcatcttgttttatcaggtgatttgcaccttgtgtcaacctcctatctcatctgtgacttagaatgcctaacctcctggaaatacagcccagtaggtctcagccttattttacccagccgctattcaagatagagttgctctggttcaaacacctctgacagatacaagaaaaaaatagcataatatattttattagaattcattaaggttatagaggcatttatttgcaaaagctttgtgttaagtctaaagccccaacaatcactttttcacttctgtgttctattgttttgttaaaagttttcaaacttctaaataatagtgaatacgccaagttttaacgcttacacctggcaggaagaaaaataagttctgtattttacactttgtttctcctgacactatttttttcttttttttttttttaaatttagtcaagacagaagtttcctgcagtggcaggaatccagtaactgaggcttttaaatatctagctgtgttactcactattttgctgcagtcatcatacttaattggtacaccctgaagtgtgaaccaatctcctacaccctctacggcccttagaactggaaggatggttttgctagatcttccttaagaacactaatatttttttctcttctaacttgtagtggttagatgcacagaattcagacctgagtgttcactggcgtttaaatattgccttaaagcaaatcctttctgaccttgtggttattgagacacttgagcctgtggttgtattctaccctattctcattcattttcatgctctggaaggggcccagtggtacaggggtatccattgctaggtcccagcctcttgctttccctcccttgaattatttccttgtcatcccattgccagggtgaagttcacactccctgagttggcataggaaatctgacccactctttactctttctccacctcactctggattccaatttatattggataccctttctagaaaacccatggtaacagcacttggggtgcattattgaaacatgattttgagttgggcagcctagctacttactgtctgcaagtccctgggcaagttaattaacctctctgaggctgtgttgctttttatgttaagtggggataataatagtacttagctcctggagttactctaaggatttagcaaggtgatgaatgtaaattactaagcttagttcctgaatattttaagatactcccttaaaacaaatgtaagccattattatttgcagttgccataacttaaggtcttcccatcctgtcctcagaatgttttgatgttttgtagccttccggctttgaaggtctctccacacccactactcatcttcttccttttcatcttatctgtggtttggatttcaaagttttaatcaagattccatagctttcccctgaacagattgtatagccagtacccagccgctcatctgctatgtctgagcaacatttgttgaaagaaagattgaatgaaaactagtgtctatttccagtagttttagttttcagatattttaagggtgataggaaaggtctctgcccacttcttctatttctctacctcagcaattcctggcctgctgcagagattcctatgtagttttgacggctataactttggtagtcattttaaatggggacaggtgaaaaaaatctttcggaaccacatcaaggtaggtcttttttttttttttaactgaatagggttcaggacacatgacttcaaaatatggcatcttgatatttgagaacatagcagaagcaggaagatctcttttaccttccccttccccttccccttctcataagaccctcattcaagaggtaccctccacagatctggagaaagggaacatccttatctctgaagatacagggacacaaagaagatttagcaaacaggccttccaaagtccctcccagcttattaccattagatcatattttttcatccaataatactttttcattactatccacttttccatcaaaccaacatagaaaaagacacaggcttccctattttgagggtttcattttcctatgaaggctcccatgtcacgtaaaattcattcaatagatttatatgctttttccttgttgatctaccttttgttataggtgcctcagccatgaacttagtggtgagtgaggaaaatatatttttcccctatactactatcacaatttaatattttaaagtaataatcttaggaagcaccatctaaaatcatggacttttcaaagaagggatgccatatgtcaaagatataatgcactggacagttaaggaggtgattttatttaggatactgctacagggagagcattaattatggtagaacattttgaagaagaggaagtgggcctggagttttagagaggccgctaaacaagggaatcctgaggaacgatggagatgggatcttacagaaaggattgaagatttcttaattctggttttctgggagcacagggctcaggtaaagttgaacgttgtcacagagtgtttcatgggatgtacaacaccacagactagtcacctgccaggaagggaaattttattgtaatatttggaggtggcaatattatttttcacaaaagcccctgctgatatatgatggagtgtgtacaaaatctgcagaggtgtgtgtgtgtgtgtgtgtgtgtgtgtgtgtgtgtgtgtatttaatttccaacttttaagttcagggttacatgtgcaggattgcaggtttgttacataggtaaacatgtgccatggtggttttctgcacagatcaacccatcacccaggtattaagcccagcatccattagctcttcttccggatattctctctcctccccgttgaccctccgacaggccttagtttgttttgttcccgccatgtgtctatttgttctcataattcagctcccacttacaggtgagaacatttggtattcagttttctgttcctgagttagtttgctaaggatagtgacctctagtttcatccatgtcactgcaaaggacatgatctcattcctttttaatctgcatatatttttgagctaaagcatgagacatcaaagaaatttctgcttgtagcagtctactttacctccaccttccttgtcctcctcctgctcccctacttcagtgaagcaaatgttaatccctatgccatgttactactgtgaaatgtttgagaagcatgggttagggcatccacagcagctattatgttgaacactctatgaaaagccacaatccagggtgaaagagtagcatcagcagaggaagaaaactgggagagtgaaatgtgtggcacccacggagtttcttttattgtccatgcaggatgtgaatggacaagcagtgtaatatatgactgacagagtagatgatactcttagttttgaattccagggtaacgtttctggatttaattcatttggcaactggtgtccattgaaggttttagagcaaggatctgttaggagctaaacatgttagaagaacattttcagcaataggttaagtcataactctcagacagatacagaaatgaacctgtgttaaagattttatttaattcacaagggaagctgcagatgatataactggtttaaaagataatccaaacaacaggcatgtttataaaacaggaatattgaaatgtgtgtgaaaatggaggcaaagctgttttcttcctccaggtggcaggaaggaaggaggtcaaagtaaacctgtatcaaacaggaaataatttgcatgtcttaatattttgcattactattagttacctgtaatgtaacagagttgtaaaataccttgaagacactgaacagacctagacattgcgtaggttccacacatttttctttttctgaagaacatgatgggagctgaatattagtaagatcatagagtgtggaaatttgtgttgaagagaaagaaactagagatattaaggagattaggagactattgcacctgaccaatcatactgaaatgtatgattagaattatgatggtgctgggatggcacagaggtgtggatgcaaggtactaaaccaaggtgggatctaccaaagttatcaattgattagaagtgggagatgagaaaggagagcctggtggctaatgcttgactggtatttggatttggcttctgcctagttgtgtaacctcaggcaagttacctgtcctctcttagccttagttagctcatctacaaaatggcgtaacaatagggtctgtcttctgaattaagcaagataacattttgcctcagtcagttcctgcttctataacaaaataccttagcctgggtgatttagaaacaacaaatatttattgcttacagttctggattctaagaaatcttaaaaggcttgagaaaaatgggtaaatttagtgagagcaaggaaatttggggagcttgaggttgatgataagagacatgggaagatgagatatccaatgctgcaatgaaattaaagcatatggaggccaggaagaggcaccagttcttaaactttgctcatttcagttactaatgacttttaagaggcataaattgggaataggcacgatggggaatttaagggagagtcaagaagacaaataaaatgagagctagctgagccactggtaagatcaatggaggttacagagctcaagatcatctcacataggtataaaggtgggccacattagaattcatgcaggtttccaggtttcaccataataccttttcaaaaatcaggcttgcaagccgacccagtttactaatttcaagtgtttcacttaggggctgagatccccctcaaggacagggcatgaaataagccatagcactaaccatgaacaccagtttgttgtttgtttttttttgtttttgttttttgagatggagtctcgctctgttgcccaggctggagtgcagtggcacaatctcggctcactgcaacctccacctcccaggtccatgaacaccagttatagatatccatctaaggctgcagactaatgtctcatggttccccctggaggccactgactgttttctttagtcctcatttctttttattttatcttttctttaaaaaaatataaactagccaccgaaatttttattgggacatttcacataggaaagttagatttggggcggcttttggaaaataagtgattccagctactcagggccttcattccattcctgaaagcagttggtgagaagttgggtttgtcgccccgggtggtgcttgctctgtccggctggctgcagttcccactactccctattatcctcagagcaagtctactttactcgttttcagtacctgccaggcccctaaagacatctgtctttgcaacccctgtgccatcctgtgcagttattgtcgaaggtttggagttgtttctgcgtggtttgatgtttaaaccctggaaaatccctttaccctaggtagagagtattgaaatgtattcccgcatctcattatactcatctgaggtgtgatagagttgtttacacctcagtgagaaaaacaaacatgccatatctattaaatgcattaactttatagaaaagttaggtaggaggagaattctcatgacactttattcttaacctaaatcataaggaaaagttattataattctgccatctgttcaagtttttaaagccattttggtaaacttaatgctaatgcaaaatacatgccttagcactaattaacaaaaaaaatctgtttcattcttctcagataatgaaaaaatatgtcaagaacatgatttcttaaagaatatctaatttatggtgctcgggcctttaaaccatccttgtgatgtgcttatgagcacaaccataagaataacaaaaagtcacatcaaatattcccattaggaaaatccccagactacaagctttagacatttacaattgtaatttagattcctatttccacttaaagattactgtcctttctgtctcatataaggctttggtattgatttttgggtaggggagtggattgtaatggagggctgaagaacatgggaagtaactgtaaggccagtattgatttaatgtccaagtccaaataccacattactcctgtagaaacctaattaattgaaatatatgtgatttgagtatgttatattaaatattgttggccgatgacttttcaaacccttttagttatattttgttagaggaatagaacaaatccagttatattatgtatttttttgctaatactctaggtgttttaaacttgcctgattttcctgccaccaccttcttgtctctgctgtgcgtttgatatagtatctctaatttatattgggaaaaatcattttatttggttacaagcccactcacaaatcttcagcacttcatttcttattagataaaatatggagttattagggtctttgctacctgtttttccggttgtagttctcactgttcattgcactgggaactcttcactccagggaaatgatttcactcaagatactgattatacctcacacaagggttaggtcttgctttggtctgcaggatgccatgacttttattcttgttttcttgaatacccaaaccattgtgccctaagaagcaattgggaaaatgatgatgatattgctgagtgtgtgcctatatgtgtgtctgtgtgtgtaaaagagagaaagcagatatgataaaaccttaacagttgaagtagggtattgcaggtattcatcgtactaacttgcaaccaattgtaggtttgagttattttgaaatacaatgttgtaaagaaaagaaatagttgagattagattagtaactcacaagtaagtgctggcccatttgaggctatataacaatcaaatatatttaattcttggtaatattcagaaatttcctgtgcattctggagaaggataccacgttttgtcctggtgttttatttcattagtttttccagtgctgctccttgaaggaggacatattggctgataagaaggtggattagttttcagaatgaaattgtgacttccttccttccttgtttccatagttaacagtcatatattaagtattggacagtgggctttgtctagagatccagagaagaacctcaggtaatctctgtcctgggaagtctacagtataggagaatacaaatgagaaaatcattgactgcaaaacagagagaaaggtgtgatggttttctcttatgttttttccatgccatttgcaattttgactatctatagacatttgatattatatccttactggtacatttttgtaattgttgccaactgatcatcacactgaatacaatgagtgatatcatttgtttcatttcacatcatcccaaattgctgttcagcagagttgttcttaataactagaaacatgccagaatactttccatccatatattttctcctttttacaatgtcgattcagaatatcatgacagatcttccttttctgacattaattggtgatatactaatgatagccttcattgtaagtaaaaatgtattaattatgagccttttttggcagtaggcattttgatttgctcactggagtgtagaatggaaataaaaacttaaaaatataagtagcaatgaatacttcagtgttctgtgctctttcaatggtgtactacagtagaaactcgatgaggccacagtgttttttattttattatttgtttttattttttattatttattcatttatttattttgagatggagtctcgctctgtcacccaggctggagtgcagtggcgctatctcggctcactgcaagctctgcctcctgggttcacggcattctcctgcctcagcctcccgagtagctggaactacaggcacccgccaccacgcccggctaatttttttttgtatttttttttaagttgagaaggggtttcgccttgttagccaggatggtctcgatcttctgacctagtgatccaccggcctcggcctcccaaagtgctgggattacaggcatgagccaccgcgcccagcccagtctttttttattatctgtttattaaataatcattatttgctctttcccatgtacagtactagctgctggaataaaggtgtctactaccataataccctttgagcacatgtttatttccttctatttatttatttttttcttttcgaggcagagtttcactgtcgcccaggctagagtgcagtagcatgatcatgccgcagtgcagccttgacccccctatgctcaagtgatcctcccacctagcctttctagtagctgggactacaggcagttgccattatgatctgctaattttttaaatttttaaaatttttaaaatttttttatagagacggggtttcgctatgttgcccaggctggtcttaaactcctgggctcaagcaattttcccgctttggtttcccaaagttctgggattacaggttccttttgtttgttaatgtccaatataaagcactgtttttctttgtctacttgtgtagactttatttcctctcgtctgattcatctttgtgttgcttgcatcaagtgtctaacacagaacctttaacaacagagctgttgcaaaaatatttttgaattaatacattaatatgcttgcaatcatattttgtcatacagccaatgattaagttaggcatatatggaaatacttggcacacattcggtactcatgacataaaatttttccccatttattctagttggttctctttggaatgcgttttccagagttagctggaattttggccattctggaagtgcattggaaggtcttcataaactgtgaaacactattacatgcctcgtgttattatggaatagataacaaagaggctacatctgtctgactgctgtgtttgtcatgtcttgcacatagttagttcacagcagggctttgacttacaagcaagatttccataggtggaaatgggagggaaaagaaaggtatgctgtgtagaagaaatggcatgagcagtggcccacacgctggacaaggataagatcagttgaaagattaactagaagtgcctgtactgggtcaaggatggttttagatacacacacacaacatgcatggagtgtatcttattgtgagtcagaaactggcataactattcccaaagatacttttcaacactggaagtacaatttttaaatataaactttggaattggaaagatgaggttttcaaattttagttttttcacttgagctggatgatcacagaccagacaactaactgtaattatttttccctcttcttttgtgcaattgaagatgttagtacttttttctcagggtggttgggtgcttgcatagaaagccatcactgaacagtggttgatagtaataggtgtcataatgttcctcactccctatgtactactccctccccagagagagccaaggcattccataaaatcaacatgatctgttacagcttcttttgggactatatgatactcaagtgctattgacctaatacttaaaagcctctggctgttttttatggatatggtatactttgttgcccaaggtaaatgcaattggaatagcttaatccagtgaaagctctttcccctcgattgcataaagctcaaaaggtatgtcttcataaaatctgtatgggggaagcatatgtgaaaacccacaaggaagtaatagagtttgtttgcacatctcccagggctacttacaaaccacgtgggtaaaggatgcccagcaatcataatgtcacctctttcgtttttgatcacccactcagacaatgagtttttgggattatctgtgtttggtgagggcagtgggagtttaaaaaatcttgttgaagcagcttatttagagattgctgtacacatcacaatccatcacttagcaggcagcaaaaccaagtctcattgtcgattgaaaatcaggtggtcttttttttaattcttcttctaaaggaaggtactttggagtagtgggtaattgcaaagcctgaagaagaaaattgtcataaaaatgaaaagaagaagattacttaattacaacaggttcctccagaaatcttcaagatgaatgggaaaatttagcagagctcttaaatgccactgtaattcagccccatgccctggaaattctaaattgtaattgaccctaattatatcaatacccgctggtgagaaaagacctgtttcttaggaagctttactgctgctgaactttgctaacaagtcacccatgacttcaacagatgttttgtacttttctggccgagggggtccttaggaaccaactttcctctccatttggcagcaaatgatgcaataatgctcttgaattgtcagtatatgaggtaaaaaatgtgctcctttagtcattgctcagactatttttatcttgcctgttagcatgttaggataatttcactagtaagcaactaaaaatgtgacccattctagcttaagcagacaatagaatttattggctaggataattggaaactatcttgctcagctgtaggtgcgactttatctagtgcatgtatggcctctcttcctctacctttccttctcttttttttctctttccccttttttctctctacgtttttctctgatatggtttggttatgtccctacccagatctcaccttgaatagcaataatctccatgtgtcaagagcagggacaggtggagataattaaatcgtgggggcagtttccccatactgttcttgtggtagtgaataagtctcacaagatctgatggttttataaacaggagtttctctgtacaggctctccttcctgctgccatgtaaggtgtgactttgctcttgattcacctggcatgcgtgtgaggcctcctcagccatgtggaactgtgagtccactaaatctctttcctttataaattgcccagtcttaggtatgtctttattagcagtgtgagaacagattaatacactctccctctttttccttcccccttctcccgtgtgtgtgtgtgtgtgtgtgtgtgtgtgtgtcttggctgtatttccttgatattgtgcccagtctccaggagactctcagatcatggttctaatgtcactcctggcactgggcctttctaatttgtccattcatgtcttgtaggaaaatggaaaggctcttctgataactgttgaaaaaaaaatccttcatccttattggtccaactttcatctctcactcatcccctgagccaatcaaatgaacagggtgatgggattttgccagttgtcctcaccagagctgtggcttatccttatagcccaagtgatggagtcagcctccctcagagcacatgggttttgtggaggaggagaagacgctgtttccgagaaaagtgtaaatagatactcggtgtgtcaaatgagaacagaattttgtcttccagattttttagtaatagttcattcccccaacttttgtttataaaaattgtgaaacatacggaaagtttcaagaatagaaaaacgaacaccttgtgaggaaggcaaaaattctacccctgccttgttagagttttttggctgggcctgagaattaaactgatgtaaaacagtttaacagaagaaaagcatgcaaatatacttaatagaagttttatggagccctcattaggaaatgaagacataaagaaatggcaaaacctagatgcttttatattcgattgactgaaaagatgcaattgtggaaaagtaagtgaactctgtaggcaggctaaaggaagataagaattattttcacatggtatctttgtgcagcattctccaggtctcaccttttcatccttgatgataaaaatgtgactttccttctggtataaagaggacatcttctgtattggggttttatccctgcattcgggaagaaaaaggggtgagtcacagcgcccttctagcacctgctgttttttaagtgcctttagctcaaaataatccttatgctaaagtggcatatgtaggggtggcatattctgccacccttcaacctgaatactaaccatttaggttgaacaattgttaatgttttttggcaccctatcttaagtggtaggctatatcatttttcttactccctcctgacaaatttctcagagtttcttcaaatgaagattttaaaagttcagtactttagaattcaaatggaaacgaaatgtcatttccatggtgctgtgtcctttacctgccttctctcctttgttctctttctgaataaagccaagaatcattccattttccaacacgctgtctcatacaccctgaaggggaaatattatacaattaaatgcaggctagcattcctctagcaaggtaaatgcttcttatttcacagatccccagttgatctcttaaatgtaattccccaatgatatgaaagttctgaattgtttatcacctcagatcaggaatattatttctgaaaacaaatttgttatcatcagcaaatcagcttttgaaggtttttgtaccaaagaataaacctagggagtggattttgaactcttagggggaagaactaaagttactttgaggacgttttacagcttttttataacgaggcagcttcaaatgcagatgaagagcaatgcactgaagaatgacaatttttagatatggttataagtcattcctctaacctggtaaaattctactctgaagtaacgaattccaaaccttgcatattcatttttgaaggtgtcatgttttctcctcgaaggctccatgtgcttatcgatttaaaaaattacttgtagttcccttttacattaagttgtagttagtcataacaaaaagagttaacatttcttaagtctttactgtgtgctaagcccttcactgagctcctaactgcattctttcatttaattgtcacaactcagtgaagtagatatgtgaatttctctcattttagagatgaggaaactgaggcataagatgttatgaaaattgcctaaaatcaagcaagtggcaagctgtggcacttggacatgaacttacgttactatgaaatgccattggttcaattcataaaaatttgcctaaatgtgagactcataagttgagagccagaggctgggcgtatatgattattatgaactttaagataagattactgctgtttttgagcaagaatgccaaatgtttaattttgtaaacccaaaacatttaatgacagaaaagctttaaaaaatatgtatctatgtataagtggtttttaagtttcttttcttcttcttcttcatcttcatcttcatcttcatcatcttcttccttcttctttctttcttcttctgtcttctatcttctttcttctttcttcttctttctgatgcaaggtcttgtgatatttgcccaggctggccttaaacttcagggcacaagtgatcctcctgcctcagattcccaagtagctaggattacaggtgcacaccaccatacccagctctgagcacttcttaatagccttacttggtagaacagttttaggtttatagcaaaatttagcagaaggtacagagtcatcccgaatactccctccccttccacatatacttatcaatattccctatcagagtgtcacatttgttacagttgatgagctgacacatcattgacacccaaagtccatagtttctattagggttcactcttagtgatgtatgttcgatgagtttggacaaatagttacttgcatgtaatctaccattagagtatcatacagaatagtttcaatgcactgaaaatcctctgtgttccacttttataagccctatattgtcattctaacttaaaatacgtaatcagctgtttaggagaatcattttgaaaacccagtaagagaaacaggaacatttggcaggtcaagaatttgcttcaactgcagcagagaggattgtagactgtgtggagaatgtcaatatgaagaaggtcaataatttgtaattggtaaattccaaccaaagctgaagagcaaaccatttcactttaaataggagtaaatataattcagaaaagctgaatacagagcttgagctccactcaagctccactccaactggagacagttacgctctcacccttaaaatttgttctgcaggtcggatctgtgttttttggcaccaggcagagatgtggctaatactcaccttgtgcctctcagccacctgttcttcctaattaaagactcccattttctgctttgctggcctcataatttgcaaataaaatccacgggacatttgatacgaatgttaagaaacctgtgaactgtttgtttctagtttgtaaagtaaaagagagacccttccccttccttccccttttctcttctgccattttaataggacatttttcccctcctggaaataaaagaacactgttgaaatgatttggttttcctccttcaaagataactctctatatatatttgctggaggtagactttttattttagtataactgttctaaaaagaattcatttatttgccatttataattttgtttttctctacatttccatttctacctcatttgcctgtattactgcaatgcctctttactggtctgcctcattccatacttctgatctatttcctaaagcacagccagggtaaacaatataaaaataagcattttttaagcagaaaattatgaagggaattaaacagtttactttaacataagcataggcaaatttaagaaaattttttttatatcttttgattttacaattattcattgtataaaaatgaatttattctgcatttattgtccaatggcttgttttggttttgtcacataaaatgtacatacagatagtttttttccagttcttgttaatgcccagataattgttcactgtatgcttaccatagtttctggatcagttgccaatattgatttatatttttaaacattttcctgatattaaaaacatttctgcaataaatatttttgtacataaagttttgcccacttgtgtaattccactagaattggaagttctggatcaagggctgggaatatcatatatattgcttgattatctttacaaatgactatatcatcctcaacatcactagtttcttttttcaattaacaaaaaggtttttcccctaatatcgtaggtgaaaataattttgtaatgaaattgtaatgttcagttagtcacttgttggtaaggttgattaactttatgagcttattggccattttgtatttctccatgatagaaggtaattatgagtgagtactttgaatattgaaccctgaagtttagaactttgaagggatcatctgattctaagaacatttctagcctccttataagttgagcttatgctatgggccctctgataaaagctgtgtgcattgatggttgacaatatgtatgttaaaggattttttgctacatcgaaatgcaaaattattagctacaaggaaattaaaagtgggccaacatacagataattttagatataaagtatgtttcagtactgatttattgtggttattttcattatattcattaaatgaagctcatgacttcttgaattcatatccatattctctatcctaggggatctgactgctgatataggctgtatttctgtcaaccatagtggattagttgcagtttttaccttttaattaaacagctgctgccgctaaacacaattttgaattacttaatagtccatattactttagtcaatgcacactacctgaatgttttaattatatgaagctatacattttttatgatacagtttttctaaaaatgcattgacagacagtaataatttgttcttttgagatgtcaggaatatcttagcatatttttaaataatcataactaaaattaaaagccacgctgatcaaatgtaagatcttttgctttaaaatataaatgtgaaacatctagaattttaaataaaagtcccattcaagatgtttgtagtctctgtctcataaacaagcaacacgtgtggtaaatactgttgagcacaattcagaacactcaagatcctaaaaatcaaacttctcattgaggccccaattcagaaattcattgccttacaattttgtggcttctgtggcaacaaagtttgtttaggcggtgtcatttggaagcagaaatcagtcagtaaaaaagctatttactgttaatcaacatgaaatcttgtaaaggctcatgattatcttgttacattattctgagttatattcagaggtattccttaaatttttggttttaataagtttaagtgactaatttactacagctctgagaaattatagatcctgggaaattatttttagaaagtgacaattgtgtgaccttttatccttctctctttatttaatggaaattccatccctccccccatacatttatgtgtatataggtatgtgtgtatcctatagacaattccctttccttgacatttatagggaaaatatgaagtataataactgaagtattgaacattagaatgaacagttgaaaatttgtcagattatatttttaggtttatcactacacctaaactgcctgagaattgctgtgatcagaaaagccacttttaatatatatactggcttgatgggaactggtatctttaacctcagcctttgattgaatttctctaagtggtagaagtaaaggagaatggtgtaagacctgtctgagtttttcagctatacaaaccatttaaccgagtgtacatgatggtaacgtcaggattcctgaaataaattatttctgttctccctgctgactcttacagaacataatttagagagcacatctggtactttctgtctgttctgtgttgacctttcattgattctttatctcctttcctggctttaaaaaacaaaaaagttaaagtttattttagaactgggtggtgggataatattataaaacaatgtaaagcatcacctgccactgtcgtacagattatatcttcaacgtttaagaaggtggttatcattcctcacggttgtaggtgttaccctgttcaagataatagtttctgctgttgaactggtgtctatagattaaataagagccgttgcctctatcttctaaaggacttcaggggcttaaaccgtggagcttaaagcatgatggaatttggtcaaaagatgtagccatttgttgagcttaaagtcaagattttaagctcagtccctagagtgtatgcaggcacaggtcaagctctccccatcgcctctccatggccagtagttcttgacaatactaatttgtcagtagtgttacattctctgaagaaaccaattgagtgtggtttgttgatgttatttgtttctttgtttgccccactagaatgttagctttatgagtgtggggatcttgtcccttttgttcagttgttgaattaatgacaacatagcattcattgagtgttaactcttttcccatctgtgaataccacttaaccagatagttatccaagtgagcaaaatgaagctgcttagaggtaaccctgtatttctgtttaatcatagaccaccctcccaaaggcgaacaatccatttgcttcatattcagtgttaaatatgagtggcccaaatctaattttttttttttttttagttttggactgaatattgacatcacactgataaaatgagaacgctgattcaaggccattgtggttcacttgaaaatgtgcctatcaattcaagtaaagacctagtggcttggagattagactaacatctacttctcctggtgtgttaatatgctgacaaaaagcaaggagatggagaagcttggggagatgttcacatatgtgtatgtgtttatataaatatatatatatgaacatatgtgtttgtatgaggaagaaggactgaaagcagtgctgtctaatagagttttcagccattatgaccatcttctaaccaatagaaagaatgaaagagagaagaaggggcaaaagcagtcaacttgaaattagaagatgtggtctttatttcggggatccctgtgctcagctaaaaataaataatatagttactgatgggaagaggtgaagaggtattggagttatctaagcagtcaactttgcctcaagtacctgctctctgcaaggcattgttctaagtgttgaagctacagatagtagtgaagaaggcaatataatttatctcatgaagattatgtggattggggagaagcaaacatacatacacacgaatatagaacatgcctggaaataatatgtactttgcagaaaaataaggacccaaatgggttttgtgaacatgttaatgaaaaaaggatgtaagtatgtactgagaaacggtttggggtgaaatatatagagtttgaagccaacatgaaatattataggattttaaacaaatttcctctgaaaataagcaaaatatcaattttatttgaaatatacagctacagataaaaatctatttaataccatgtgatgctgtaagattgttttcattaacatcctcttgtatacattcttattcatactggagaagctgggaagaaataaaacgtgaaagataatacatatttttagttgttaccaaatattaataatggcctaaatcaatgaagttttagtgtaattacatacacaccctgtttttataatgattgcattgtgattttcattttcctaaccaataattgtgattagtcatttgattgttaccacaatttttctctacctaggagctaaagaacatattaaaatccttggaaacttagataaattactgtaatgaattacaaaattactagaggtgatgatgatcaagataataataaagagtaattagagtaagctccacttcttcctcttttatagcagtccctttgtcttagagtaaaattaaaaaacagaagcaagataaactaactcctactagtcatgaatataactcatctcttctctcttcatatgtaggaataggcggtacctatctgggaatgggtccgcagaaacagtatatttaactctctccaggcaattccctgacatttcagaactggtttctctaccgtttatctctctttgcctctatccccacctgcaatctgttgcttttctctttctttcaacccttacaaaaaaagcaaaaaaactacagattaataggaagatagtacctttacatagaaatattttcttggcccattataataaatgcatgtaaataaatatttttttcatactcatgagcgtgcttattaatggaaaattaggggacagtacttaaaattcctagaaaattcaagatttttaatataaatttgacttaaaacatgggggagaaggaatgctctttagaatgggtctgtacatccaatcttatttgataaattttctggtgtttcatttgtgatccttgttatgtttctttggcatctaataaagaatgataattcccttggtactgtcttagggaattatgacagaatttaggaagaagtttcagggcagtcttttaagaaatggaatccacagaggaataaatatgtctttaaacttcttcagtgaagtgattccccattccacccccgtttcctaaaaactgttgcaagtgcatccctagctttagtatttaaaagatactcactatgataagtttgcataaagaaatatttacttttaaattcttacaaatctgttttttttaacaggtcccattaagttctgaaatagtttccttaattcctcctgtgtgagaaacctgtggcatgttttaatcactttaaacaatttttttccctccagaagaaatgatttattccctatttcctggtttatttcaaagcaggtacagctcttggatctgagggttgctaataggttttgaagctaactgcaaagccatcagcattctacttcctgctatctgccagctgttgaggactttgtctccacaaacaaaggagtgcaggttgaaccctcctttccatctcaattattgcagaacaggcttccctcccaagtcctctgcatttatcatccctcttccttctctttctttgttctatagcatttgaattgtataaaaacgaaattatatttggaccaaggcaaagtgctttttaatgagacagtttatttgtgcttccgtgatgttttttctcgttatgtgtgagctcaaacaacagaacacattcctattgaaattaagggtcataatcctgatattgaagtcttcattagctgctttgcatcctcggtagcatatgttgtagtttgatctgctctgatgatggaaatttaagggttttgttatcagtttatttattttaaattgcaagctgtagcttaatagctacataactggctcttaataggtatcaggaacagaaatataaatttgaagcaaagcctttttttccccattctctcctactaatgctctgattttctattagaagaatcagaaagcagtccaatggcttttgttgactggaacccattttatagtttccagtaactgtagctgtctctgtcctgctgtggtagggagatgcatattgatattgaaaacctaacttggtgaacaaggacaaataattattatgccatttgcttgtttacattgtattatataatttttacagttttttgtgttgttttatttaatcctatgatagcagtcctgtgaatttgctctgtcatttgctaatattcctattttccctgtgagaaactgaggcttagggaggcgaactgaccaacttgtggtcataaggccaataatagggagagtagaatagagaaccaaggtctcaacttcttagatgctgtatctatagatttgacttcccttcttgggtctaaactgaaatccatttatctaagtctattagtaaggtagtctttgattttctgaagtatttagtcttcttattcattaagtgagaattgggcaaggatgagctttgtggatcattttactttaaatatagttaaatctgtgtgtgtttccatgctttagggaaacttttgcttgttagaaatccagtggagatcctaggaactctaaagcctcttcacttatttttcatgcccaaaacaaaaagattctgttttttgtttgctttttgagttgtggtctgttgcctaggctgtaatgcagtgctatgaccatggttcactgcagccttgagctcctgggcataagccacactcctgccttagccccctgagtagctgggactacaggtatgtgccaccatgcccagccaagttttttattttttaaaagactggggtccccctatgttgcccagggtgctctcaaattcctgggctcacccaatcctcccaccttagccttccaaatcaagttagtgggactacagacatgagcctctcctcccagccaaaaagatgctttcaaaaagaagtacattcaactaccaaattttcagaccaaagcagaaacaagtatatagcttccctctttttcagtcttcccatttcaaaatgtaaatatatacaaaagaaaaaatgaagggcaaaaactctggaagtaggctttgcaaaaatatctctcaagttaatttgaccttttgctcacaaatactcatggctgaaatggctgcagtgtgcaacagacctgggctaagtatatacattcttagaaaaatgccagggatgttcctaaatattttcttcaattatctatggaactccttggaccatgttttagaaaatgattttaattttctttgcaggattatcataattgaaaaggtcacaggaatcagctccattcctaatgcatttgtacttgccaaagctcagtcatggggaatctttttggttttcatattcaatacttttctttttgctttgttgtatgataagggagaaaaacagggttggcatgaaggggaagtgaatcaggtgccaactttttttgttgttcctcagctctgatctttgctttccctgagccttgtcatctgtcagggaaaggaagagtgcaactacactaagggtttgaaaaatgaatcgatcattctatactttcagaaaacatattcagtaatctttaaagtaccattctcatgtaggcgatagcttcaaggttccagcataacatatgcatagtgaaatgttttaatcttttattttatgcttttcagcattttagaaagcatcttttgtgttcattttccatggtgctgtgactttttttttttttttttttgcttagtacagctagttgagtggtataaatttcttaagataataaaaccatggctttcttttatttcattcttagataggatagttttaaaacatttaatattattaaatatcgctaagatagagtaagtacagtagccattcacctatactgtacattaatacttaagggctttattatctgacatttcatgacttggtttagttctggaaaaaacctgaggaactcattaagaaagggagggagtgtccaataaagtttgtatttgttgctgatacacaaattctttttttttttttttttttgagacggagtctcgcttggtgccaggctggagtgcagtggtacaatctcggctcactgccacctccgcctccaaggctcaagcgattttcctgcctcagcctcccaagtatctgaggttacaggcatgtaccaccattcctggctgattttttttattattattatttttagtagagatggagtttcaccatgttggccaggctactctcatactcctgacctcaggtgatccacccgcctcggcctcccaaagtactgggattataggcataagccaccatgcccggcccacaaattcttaatttctacctgcctctaaccagctgcttctcccagaaaaattcagtattttcaaagccagagcttttcctaaaataataggtagagacatcttcagtttttatgtgggtagttacattaggcaccaagaagcaataacagtggaaaactgcaaaccgaatgcaagtatggggcagtttcttaatttggggtcagtggagcgctttgtggaatcaagtacaatcttgtgatcttgggtggcctgcctcactgtggtcaaacataaaacaggaataaaagtttctatttcacaggattctaagaggattaaacaagatagtttatgtgaagacactcatcaaggtccctgtcttctgataattaaacgtgaattcagtgtggatccctgtttatgttactgggatgtaagctgaaaggagttaggtaggaggctgttagcagtcacttggtatatttcacttgaacctgttccagtcgcaacacaccatggtaggtgtaaatatgggcatttctcaactggtttaggtcatgtaggaaataggtgctatcatcagattaaccaaaaaaaaaaaaaaaaaaatggaaaaacaaaacctgttaatattcacaatttttaaggatatggagaaataaacagttccatactctgggaagccagtctgtgcatacccttcaacctagtaattctatttttgaaaactcttggtgctttttcataaagaaatatgatctaggatttgtaagagtgaaaatggagtatcaatatattttagtcaccatgggaatgatgaataaatgttggtatatccaaagtgtggaatgctagtacttaaagtggatgaggtatgttccttatctgggactatctatctctgagatacatggttaattgaagggagaagtttataaaaccttatgattctacatatgcatgagactcctacccaaacacaaagcttgtatatgtgcatatgtagctaaatgcatagaaaaagatctgaaactgataataaagattgcttttggggaggaaagtggattaaaaggagtgataagggagtttttatatttttctatatggtttgaattttttacagtgagaatattttcaaatattactgtataagtaaaaaaaaggaaataaaacactcaattgccttgcaaaacaagacaatagcatctaatagatggatacatgaacatatccattcacaaagaaaggcaactggtctctaaaaaatatgtgaatatgaactactgcttacagataaataattcattagaaaaacccattgtgccacagcacttcagttttcagtgatgcttaccttgaaattttaacagtgtttaagactgaaaagagaatagaaaaattctactggggatagaatggaagggtagtagtggggatttgaagcaaactgagagttgaagggtgctgttggcttgcttcattcatcattcctttatttatttgattctttcattcaacattttctgaggaggaagtctctggggacacagacccaaatgagatgctatctttgtcctcaagggcctcatctagtatgtgtggcaaacacatagaaagtaaattactttttattgttacaatcagaggaattaaagcatgaacccagcaaggtcaaaccacttagaacaatggaattgatttgaaaatgaggtactagtcatggaaatggaaggctttctgaaagaagttgcattcaacttggatgttgaaagatagagaagatgcatttgggcagacagcaaactcatgggtcttgaggtgtgagaactacgtgcagcagaagagtatgtctgaggaattaaaagcagacccagatagctagaagcaaaatacaagaagtcctctgggttttttagcaaaaggagctctagtctaacaataccctatgaaccctggagccaattgaacgctctagtgataaactgacctttattttttaaaattcaaacactgggaggatctccattgtgagtttttgctttttgcttccatttattgaaccttcctgtgagaactaacctgtttatgaaacatactacatcctctttaatcaaagcaagcatgacagctttctttctgttgtgatgtttttcaagcttccctttataaaattgacatcacagtggaccacacttgccattgagatcatgtaactgtagactgtcaatgatgttgctgtgtatgttcacattgaggttaagtctgagtctgtatacaatgtttccttcttgagtttctcaaacgtctgagaaggaaaacaatacttaaaagcatagatatggccgggcacggtggctcacgcctgtaatcctagcactttgggggctgaggccagcagatcacgaggtcaggagttcgagaccagcctggccatcacggtgaaaccctgcctctactaaaaaatacagaaattagctgggcttggttatgggtgcctgtaatcccagctactcaggaggttgaggcagaagaatcatttgaacccaggaggcggaggttgcagtgagccgagaccacgccattgcactcgagcctgggtgagagagtgagactctgtctcaaaaaaaaaaaaaacaacaaacaaaagcatagatatttaaaaatacatagaatctacttaacagagaaggattttgaccatggttgaaagatgcaatatgccatgttttagttgtttttggggagaggaagatgggaaaggacctttgaaatgatgtttgagtttggatgtgatttttgaatctctctcttattccatgtaacgttgagaagttacaccttgttcgaaactgctcctgatgctcttgggtcacctacgtagccccaggataaatttgtacttgggaaagtaggtatattaaaagtaaaaatattaactaactacagttatcctcgaatgtgatactaaaccatcattattaaacaacatctcaaagaaggattaaagtctaccagtcagtgtcctatcactaatacttctgtgtttctcctgagacacataatgaagcaagctctgaaggtgacatccaaacaaaggctggggaatgtaaactcagtttggatctttgagattaagaagagctatctcttcttcacagccctataggtcaatgggaaaatcttcaaaatcaattctttcagcagccaggaacatctgaaaggaaatcaaaacttgcttattatgctgacatggtttaacaccagctaagacttagaaatgaattttaaaatctaagctctggcaacaatacatttagcaaaatctcctgctcgagatatagcaatcataaactgtcatattccttacatataagccaacaatggtgttatatattcggtatcagaataatgaaataaagactatatgtgtatgtgcatgtattgtgtatggatatattgaatgcaattcagagaaaactcacaggtattaattattcattaattgtgttaatatgtgtaagtagttattcattatgttgacatatgtttaattcaaatgaaatccgttagtgttaactattcattaatactacagatatatacatgtaaggataatttcactttccatggcattaattattattattttttgttgtccctgtgctatgtacacagctttaattgtctggtctgatttaaaggatttgtgtaatgtgtcatcattggaatcctacttttatgctaggcactatcataggcactggaagcatgcaagtgaactggacagacaaggtcccaatgatctcagagcatgtattctagtatggggagtatattgataataagtgacttgtctgttaatctgttctcatgctgctaataaagatgtacctgagacgtaatttgtaaaggaaggaggtttaatggattcacagttccacgtggttggggaggcctcacactcatggcagaagataaaggagcaaaggcacatcttacatggcggcaggcaagatgtaagtacagggggcatgtacagggggactccccttcataaaaccatcagatcctgtgggacttactcactatcacgagaacagcatgggaaagacctgcccccatgattcaattacctgccaccgggtccctcccatgacacatgggaattatgggagctacaattcaagatgagttttgagtggggacacagccaaactatatcagcttatttttcaaaaggacttaagagaaaagatgatttcaaaaagtgataaggattatgaagaaataatgaaagaaaataggtagagtggtaagggtgcagaggggtgggcaggaggagagcggggagggaaggtgctttaggtagcatggtggaggaggccctctctgaggagtttgttggagtggacacctgaaggagaaggagcccaacactgggcacatctggcacatcttggggaggagccctctaaggctgaaaagagcctgtctgaaggtcctatggtggcaaagggctggaaggcacgggatggctgttacagctgtttggcagttaatggacaaagctgggtactggataaaatcatggattgccaggcatcagtcagatcattaaataccttttgagccatacaagttcttaagattttactctctaagtgcagtcaggagtcattggggatttaatagttttttattataaaaatgttataagatatgaaaatagaaaagtatagtgactcccaatgtacccattgccgagtttcaataattatcagctcatggtctatcttattttacctatcccttctctccagctgcaccccttcccagtcaccaccactgcacagtgttatttgaaggaggcatgctgtcatttgtcaccatagatctctagaacatcagaactcttttaaaaactatagccatagtatcattatcacttctaaaagttgacagtatttccttagtgtcatcacatatccagtctcatttggagttgtacgcaggagagtgatattactacatttgcagctttaaaatgagctctctgttgtatatgacatggctttagaggggcaggagtggaagccaggagatcactcaggtctccttgtctgtgtttagcaaacagaatggtcagaacaagggtgcttatactggagatggagatggagataagattttagctttgggatatgcctggaggcagaactgacttgctgatcactactgagtctggcccaggaaacccagcgaatgtgggacgctaataattgagatggagaagacttgaggaggaagtcttgagggttggaagggaaaactaaggattccatttaatttcacctctgaaaatggaaaatccttaaaatcagccttcaatagaaaaagaggagacaaatgataacatgcatctgtacttaccaagacttcccttcagtcctgctcaatgatatatgttaagggggataagataatggaagaaattgctcctgttcttaaaaaatctcctaggtttacttgagatctatttagatccactcaagagaagcctttcactgagattgcttttaaagatgagtaaatctgaaaagtctggctgtccaaaaacacctccatcaccctaccatgtgtagagtgaccttatttttcccaacttgaaatatgatgcaggacttgaaaaatgagagtgttcttacagggacagtgtgcatgaacaaatgacatcagggctggcttgaaaaataatgtggcacataccatttctactacaagttcctattcaagaatgaactgaagagccttgtctttgagttggtgtgacatctgttattggcatgtataagttaatggatgattgttgctcatggttatctgctccagaaaaatgcccccttccctccttattttatgctccctgtctcctggaagcctcagccctatggttaaggccttcagttgattaaatcaggtccacccaggataatctccctaacttaaagtcaaatgattagagacttgaattacatctgtaaaatcctttcacaggaatacctagattagtatgtaactgaataagtgggaactatagcctagccaattttacacatcaatgtgctcatctatttaatagggataataataatactttactgataagcttgtttgggggaattaaaggagtcaaggcacgtaaagcacttgacacataatatgtgctcaataaggattagttattctataaggcaggaaagcattaaatggctgccttgtggcgaagatctgtcaaaactagatggtgtcttgttcagtgataaaagctagacacaaaagagtgccacatatgtaagatgtggaaactgtcaaagttcaccagtggtgctagaagtcaggttgttggttacccttgagggtacctggaaggctgcggcaggtagactctgaggtgttggtaatactgtatttctggatctgggcgttggttacatgaaagtgttcagactgtaaaataattaattgaatttatatgtatatgtgtgtcagttatacttaaaaactgaagtactggatgatagataccaacttctattggatatgtgtgcgcttctgtgtatgtgtatgtgtacatatacacacatatatacacacatatatatctgcaaagaaggagaataatatatctgcaaagaaggagaaaaatttttcctcccatttcacaaatatgagcatggctcagaggcaagatggcagaggagctttattggcgtatttgaccaaacctcataagattattttatttccgagttgttgccactaccatgtctgctcacattagaatggttattgaaatattttaaggccaggagtggtggctcacgcctgtaatcactttgggaggtcaaggagggcagatcacttgaggccaaaagttcaagaccagcctggccaacatggcgaaacttcgtatctactaaaaatacaaaaattagccagacgtggtggtttatggctgtaatcccagctacttaggaggctcaggcaggagaattgcttgaacccaggatggggaggtcatagtcagccaagatcatgccactgcaatccatcctgagcagacagagtgagattcaatctcaaaaacacaaataaacaaaaataatactattttgagaattctttggacaaaaaggcattctactcataaggctattaactcagagaccagagcaactgagttttccccaatgtcctgaacttttcttttcaagaccagtgaattgaatccatttcaaaactgagatgcagtgagcttacatgttcattatctgtttgcctatgctatctgcgatttttaaaaataaggagtctcggaaagtgattttttttctggaaaatctttacaccagagcaatatgatcagataatgttatttttaaagtgtagataagaaattataatgtcatcttacaacttaggtgagcatttatagtagttccaggtattcacttggataccaaatctctttttaggatatgaaataaaatgttgcattttctcttattatttgactgtgaatgatgtgattttatatttagattagtgctgtcccttaaaactttctgcattgaaagacatgctcttttatctggtctgttcattatggcagccagtggccgcgtgtggctcttgtgaactagaaatgtggtggtgtgaactgaggaaccaaaattttaacgttattcaattttaatatatttaaatttagctacatgtggctagtggccacggtattgaacaacgagatttgaaatcttaagtaaaatatggtatttggcatagaggtgagtggccgattacacttaattcttgttatcttttttagagatagggtcttgtgctgttggccaggctggagtgcagtggcacaatcatagctcactgcagcctcaaagtcttgggctcaagctgtcctcctgccacagcctcttgagaagctgggattataggcgtgcatcaccatgcctggctaactttaaaaaagtccttttagagatatggacttgctttatttcccaggccagtcttcaatgcctggccatgatcctctcaccttggcctaccaaagtgctgggattatacgtaagtgtgagccacagcactcagtctcttaattattttcttagaaactctcaaaagttcatctacataatgttttttctcagcccagttactctggattttccctgataggaaagtccccttctaaagacagaaggttctgaattatatggtaaaaatatctacttttatacttttactgtgtacacctgttccttaatttccttaatccctgggcactgttgttcttctcccatcttgggtaatggcttgctttcttttctttctttcttttcttttctttttctttttttttttttctttttgatgatgtctcactcactttgttgctcaggctggagtacagtggcaggagctcagctcactgcaacctccgcctccctggttcaagtgattctcctgcctcagcctcccaagtagctgggattgcagatgctcaccaccacacctggctaatttttgtacttttggtagaggcagggtttcaccatgttgcccaggctggtctcaaactccttgcctcaagtaatctgcccaccttagcctcccaaagtactgcgattacaggcatgagccactgcaagtggccaggtaatgactttcttgagggcactgtccctgagtttctgcaacatagtaagaagtcagtaagcagttcgtacatatgctgggttattaatatgtgggtcaggaggcagtggtgtgtcactcaagagtgtgaggttccattctgacatttctcgaatctcacctctgccacttagtggctcagcaacttccttgccctttactgatgtttcttcatctctaaaatcagtaatgttctacgtattttatagaactattgtggggattacataagaataggaaaatttatgggatgctcatgtagggaaccagtccccttcattctgcagacaaaatgacttaagcttagagaccaggagtggctcttctcaaatcaaagaactggttggtatctaatattgttttattcaagggtctcgtaagaatatttttaaaacacgctataaattggcctttgtacctaaaagtcgtagcattatttagtcctctaatttccttgtgaggtatttgtcatttctcccattttatacatgtagaaacttaggcttagaaaagctgagaagcggtagggctgggatttgaacctggacaatctccatccagagccatggatgtgtgttttatttttttaaattttatctttttagtagatataattcacataccaaaaaaattcaccttttaacagtatgcaattcagtggcttttttagtgtattcccaaggtcatacaatcataactactcctgtctattaatagttccagaacattttcgtcttcccaaaagaaagccctgtgctggttaagaagtcaccctcattctcctatgcttaatgtccctggcaaccactaattttctttgctctgtgtctgtggatttgtctattctggacattttacataaatgggatcatacagtatgtcagagccagtggtttcatgccttactttatactccttccaataatgagataaaggtctgccgtacagtgggagttcaaaaattaaaagcttgtattattgttgttgttgccattatgaaggacagtctggagtgatagggtcatctgtttttatgtttattgtgaggcaagaggcttggaggaaaaagttaagtggtagtaaaagaaaaaggaaacctaataggtctccctcttgcaactatctccagctcccctgcagttcttaaaaaatgtccagtaattgctttttaaaatggttcactttttgataaaatccatcaagaaaaggaagcagaaatgaaaaacaataattaaccccaaatcagctctgtatgagtgtcagtacagcattccagaagttcttggagttggaagccatgtggggaatcagtcactttcattctacagatgagatgacataagcttagagaccgtaaatggctcttcccaaatcagagcactgactgatacctaatacttgtttttatccaatggccttgtaaaaatatttttaaacagtgatccatgatttacctaattggaggtaaatgtggtatagattaaatcagtgttcgttgattgttcatttcagccgtgttcttccttcttccaggaaatcactgaacagaagtaggtgaaaaaaatacaggtgtcacaaaatttgaagacagccctcaaattccaagggaaatgtaaataatgaaaacataacacacttgaatcaagctatttagctggccagattcaggaagctttcatttcttcacttcctctgacttgggtaatgaaaatattttcagaggtgggatggtggtccttcgggaatcccacctcacttgtagacagagttaaggtattagagttctgaaatgcatgccataaaatctaataatgtatgaaacaggcaaagatgttgattttattaagaatcttggtaaaagtcattttccaatgcagttctgtgaaactggtggggagagtttagggattcctttgaatcaccggtggtcacagctcattgccccagcccatttttctaacaggtgttaggttatgtggtttaggccaggaagaaagcttactttggctttgttccattatacaaatggggagaattttgatttgctgcatacctctgagcccttgtagattttcccatcatcctaactgctagtttattgagattaagtgctttcttatgtcagtgcatggaaatgacttttgattttcctttaaattaaatttgattcatttactacgttaggtagatagatgttctagccagaggagaagataatggctcacattcacatagagaagtggcgtgacaatagagacaagatgggatatcagtgtccacagatagatgcgtgctccaaaaccagcacttctcaaggccatagggctgtatgattatttgcttctcattcttatccctagacacatccatgtgaccccataagtccccttcctgattctccctccttcctctatatctagtctcgagagacaaccaactgttgttttccctccatgcttcctttcagcctggacacgttcccagtttttcatttttccaaagtgctttaatcctgcaatcattgtgtgcagcaacagtaaaggcttagggtaaaggagagggattacagaacatgttagtatagtgcaggcaggcagtgttttttttttttttttttttttgagacggagtttcactcttgttgcccaggctggagtgcaatggtgcgatctcagctcaccgcaacctccgcctcccgggttcaagcggttctcctgcctcagcctcccgaatagctgggattacaggcatgcgccactatgcctggctaattttgtatttttagtagagacagggtttctccctgctggtcaggctggtcttgaactctctacctcaggtgggctgcctgcctcagcctcccaaagtgctgggattataggtgtgagccactgcgcccagccaacagtgctttttaattgaacagaagacagctctgttgtacaagtcctctggtccttcttcaccactgggaccttcttccccaaatggattcccctgagaccatttgttaacatctcctcaccctttctctccctgtggggctgtcccattgctgctctgctaaatagcttagtcccatgattcgtattatgttttataaacagagcgcccagcctcactgggtcccttcagcacaggcacccacagaaatgttgaaatgactgttttccctttggtatggtcacattcctggtcaggacttggtcctctgcagttctgtagatctgctgagggaagtgcaaaagtggagagagaatgctgtattctgtctcagccccaaataagctgtcctgaggtcatctatttgctcccctgtccgtctgttatcttcagttacaatgcagttttgatgatcccaaagtcgctgttttaagagggcaagttttgcattaaatgcttatttactgttgctctggtatttaacagaacagcctgttgagaagtaagcgtctactcaaatctcccttctgattttaaacttcagccatcaggagccacacaacctactcacaccattctgcgtgcagactgtcttgtatctgccctgtcttttccctcttcctgggaggttctctcaactctctcccatccctaatacccagacatttatacctagataatacctcctagtcctttagccctgtttctaaactttctcctgttctccaggtacagatactctgtcttctttcctccagcacttggtgtatcattgatctcacaactctcaaattttctgttccattggcaggacagtaagagtttgcctgcaaaatgaggatatcaaaagaatattgagttcagttggtcagcatgtagttaaccacgtcactggataaagtatctaatcaggtatctagggatacaaagatgagtggagactcaggcctgccacagaggcatggcatatatggtctgtgaactattaaagttggcatgtgataatttctgtaagagagacgaacacaaaatgctatgaaggacttagtaatgacgaaattctacctagcttggggggaagacttcttagcaagcattactccagtactgatttaaaatcggaaaatcctggctgggcgtggtggctcattcctgtaatcccagcactttgggaggcctaggcaaacagatcccttgaggtcaggagttcgagaccagtctggccaaaatggtgaaaccccgtctctactaaaaatacaaaaattagccaggcatggtggtgcatgcctgtaatcccagctattcaagaggctgaggcaagagaattgcttgaacctgggagccggagttttcagccaagaccacacactgcactccagcttgggtgacagagcaagaccctgtcaaataaaataaaataaaataaaataaaataaaataaaataaaaatcctggtgagagataaaaaggagaataaggcacatccctgccctcatggagattatggtttgggtggacatataatttgttgtccaaaagaggatgctttagagagggataatcagtacgtcaggcagctccggtgaactgggccttcatgggtaccctcatggatggcttaggagggatatgagcataaggagaaactttgtgaggggaacatttcgaagattccttgaagaacaagtgaaagacatacaggagcagattatatgtcttgaaaggaagcatctcccttcttgaattcttttcacaactcaagttaattatcttctgtttctcttttactgtaaaaatctatctactgccttttatttgccatcattttgcatcaggatcaggttgggacagttttcacaagagggatagtgggtagtgggtctttagagtacggactctggaaccaggaagaatggattctcctctgtgaacctcagtgctgtcttctggaagatagcggaagggggataaaatcggtactcctccacagggaggtttgctcgtttttgtttgttttttacgaaataaatttgttgagaggctttggtgtggagactgataggaactcaataaaagtttgctattattgttaatgtttaagttatatatagttcacactatatggaggggaggaggaaacatacaagtttgtttcaaagctactagagttcagttgctttaacctgaggatcaagcaccacgaccaagaattgagagagaacaggacgcagcacgggcacagaattaacttgactccgctttgagaatgaggagatgagacttgtgggccagaaccaagtcagccatggagtgactgtgaccattgtgctaagggttactgaaggggagaaaaacccagggtcctattgtaggtggtgaaatccaaaggttcagagaataaccagtggtgctaagaaagcaattagcacctgtatgtaggaatgaagacttggcagggggctttggaagaagcccatggcagcctataattatgaaaataaaagtctaatggtataaaaactagcaacacttaaaaatcactgagtaatgaaaagaaggctcagcttgttttcagtagggtttctcaacaagcttgttacttgggaatattgaagggaaggtgggtgtgtgcagtttttagattagtaaataaaataagtaaataaaagctctcggattaccaccttaggaaagaagtatattgtaaaacaaagcatggatcgcttacgtgttgcaaagatgatgtatgattcagcggttccaagaatggatctggtgcccagatggacctgaatttgaacacgacttctgccttttgctagctatgtgaccttgtcctattgacttaagctccctgtacctgggtcctcccctgcaaaatacattatatgaatacctcctcaaaggggtattgtaataaataaagcacagagcatgacaccactgagtgcctagtaaaagttaggagccctccagggactctgcaatgtcattctgcctgaggggagcctctatccctggaagaaagtcttccttcatctctgatccagttttcccaaatgttggaggagactattgtagatggaaaaatacgtgtaaatgcatacgtatgggtatgtgttttaatagtcaaggagtaattgtaatgtaattcaggaaaaactagtcctagcaaactctttatcctaaagttattactgttaggctggtgcaaaagtaattgaggtttttgccattactttttgtttttgagatggagtctcgctctttcacccaggctggagtgcagtggtacgatcttgtctcactgcaacctctgcctcccgagttcaagcagttctcctgcctcagcctcctgagtagctgggattacaggcgtgtgccaccacaccatagcaggtcctattttcttgtcctcctttagtcaaaccatcagcatagtgtctgctactgaagttatatttaaaggtggtaggaaatgttatttaaaataatattttaacccagctaatttttgtatttttagtagagacggggtttcatcatgttggccaggctggtctcgaactcctgacctcgtgatccacccgcctcaacctccgaaagtgctgggattacaggcgtgagccaccctgcctggcctttgccattacttttaatggcaagaaccacaattaattttgcaccaacctaatgcttagtgtgaggctattgtaaaaaggtgaaaagagcattgagtgaaagttggtacctgtaatacacagaagtggcagaaaccataccagagagcaggtgaatgactgaagttgaagaacagggaggggagggtagaagaatataatttcttctcgagagcttatactttttctgccctagtaagagggactaggacttgaatcctggctcagaatgaatgaatgaatgaatgaatgaatgcatgaataaataaataagagagaatgatttcctgtgttgttagatggaatttcaaagagttgatttgaatacattcccaagttgagctcccttgattgtctcctggatggaaatgcttaactagcaggttcgtttgtccatgcccaataatttttgagcacttactgcctaccagtatctgttccacgtactggggaggtgataataggaaagatagataaggccgtgctcctaatggaatgcgaatttctgtgtgtgtgcatacccacatttatatagggatagttgataagaaatcatgctgaaaaaacaactaatttcactctactaggcctaattaaaaaaaaaattaaataggacagcgatagagaattgggaaaaaatggttgctacagataggatagtctctgaggagatcaattttaggcagaattctgaagaaggagaaggagccagtcattaaaagatctatgggaagggtattccaggctgagggtccatgaaatgctaaaagtgtggaatgactggaatgactatgagctgggattacaggtgtgcgccgtgtttcaggtttagtaatgagaatggtacaaacagaagttgcagagataagtaggcagccaccgcatgaaggagccttgtgggaaatgaccagaagtttgcattttattcttagtacatattgaagccactggagtacttttagctgaagagtaatgtgatacgatctgatattttcacagatgtctgtagttgctgactggagaatgggctgtaggaggatggatagaggcaggcatctctgttaagggaacccttgtagtagcttaagcaggtggtactggggagacactggccttcctgttgtactgaactgctgttctcctggtgaagttgtctactattatgagttgttctgcttgtctaaaacaaaaggaaaaaaacgttctgaaaacagaactatctgttgattataacatatgccatgttagttgatgaaaaaggaagaaaactagacatagcagttactcagaactacttttaggagatattttgctttccatttagcatttgggaccagctgaatacacagttacatgattcttgtgagctgtagggcacattaagaataatgagactagctaaatgctttaggcattataaagccatcatataccaaatgtgttattgttaattcatgttgctagcccacccttttaatagccgccaggagccataatgacacatgctgtgaatatatattaaaacaatccccacacgttgctctagtgtattgggtaattagatatttctctgtatgcagaaaggcttggatgcagctagatggaaatggcatcgactgtggcttttcttttctaatactgctgtgaagaaatgaatgtcggctctaaatgtataatctgtgcttcctcagtctgtgctccatcctggaaaacaagatttttggtgccatgatccctgaatttttgttgccaccatgcatgaatttgagcaggtcctattttcttgtcctcctttagccaaaccatcaacacagtgtctgctactgaagttatatttaaaggtggtaggaaatgttatttaaaataaaatttgtgcttaattttttctgctgaatattaaaaaatactgtataccataataaataatttgaattcatcttagaaattatataaatcatttaaaataaaagttgaaacatagtatgaatgctattatgaatgctattatgtcagttgatttattttttttaataattaatatctcttgggcattatttccataatttgaggaatataactttaataataaccctttgggcttgcctaaatttaacttaggtggggacaggcaggccttgaaaatgagtgaagggaggtagataggaaatatattcaggccagagcatttatacccagttttatcaggtctgatttttgacacctgaatttttacataaaatgttcccaaaaccaaacatttttaagttacatttctaaattattcaggcccatttaggactagaggcctccactttgtctctgatatggatctaccttattattgtttttcatctaattacctattgatagaaatttagatctaaaattcatgtttagcctctatcctgacttgtaattctttgccactttcttgccaaaataagcttttgtatcagggggactgatgtccatgagccactccaaaggattttcctcggctgcaagtacagagaaacaaaaatatgagcagtaattgcaagttgactgaaatatttacaactcacgtaaggcagatccaggttgagtagcgtctgaatcttatgcaatttttatcctctttaggataaagcctacacaattataaccacacatttagatacaagatcttagaaggggtgttagcctaagaagccctaaagcttttacttcattagcttctgggtgaggacaagaagaaatggagtgaggagaacaaagctttgaggagaaacagatagtttattttcccaagattaatgaagggggacagggaagtatcactgacatcattaacatttcaacaaaagtaaacatattctgtcagatgaacttacagccctctgtctgtttaattatatattttaaattgatgtttctctaaaattctgactatgttcaaagttcgttactcaataataagtttacattttaatcaggaggatgtcagacccaataactcaattcattttgagaatacaaactaccttttgtttaacataaatatgttgactttgggtagaattttctcagttactggagactcccaacttttattatttataatacttgttacacagatgaaatagatattgaacaaagtatagggctattacaaagcaaagatttcacagcattagctttccaagagtccagtggcctaggaacgttagtatttcatgttgaatgtccacagaaggattacgaggggcagaaacccagaatttgccagaaaaatcttcaggagcaatgaaaacccaaaataagcaaagccagatgcagtaggaaattagataatttgtgaacaaaatgagagtaatgtgggtagatagaccctgggtaaataaacaatattaacttctaaattatttgattcagccttggttaaaatggtagtaaaattcagtgatttccagtttcaccagtgcttcatgagagcctttgaagaagttctaggaaagaatattggaagaatacaaagcattgactgggtggcccttacctttgtttagaagcaggataagaaaggttaatttatatatgtatgtatatatgtatgtatgtatgtatgtatgtaggcagtatagagttaagagctcagaccctggattcaaacctcatttatgtcacttacttagctgtcagatgcagggtaagttacatatccttgggctaataataatagtaactaaggctgatttctaagctcttagaaaagtaccatatatgggtttgttgatatcacagtcatcatgactgtaattagtattgagcacatattcaccatcttgtcattgcaaaattgttagtcttctgttaagaacttttctgtaagatcgaaaggtttgttttaattatgattttcaagaatctttgccttgaaagtttaaaggccatatgtgtttgttattaaagataacatttgttagaatgctttcaaagaaaaaattgttcatttaaagctgtaaactatgtttgtcatggcaagttgaactttcttatcaactgttttataattgacacattgcttatgacctagctgtacaatcctgttataattctcttagcagtatataagaattaagcattttctttctaaggtagcaacattacttgaaagctttgtttcctacataaaatatatttaactacaattttaagtattcctaaaggatttaaaatgtagtatctcattctttcacaagccatagtttaatttcttattcagtggttcttaaacttttcgatctcagaatccctttatactcctaaaaaagattgacgaccgaaagaagttttgtttatgttgttaaatctattgatatttgccatattagaaattaaaatttttttaaaataatactttaaaacaataataaacattttgcacattaagataacatttttaaacaagaattaacaatttttcaaaaccaaaaattgagaatggcattgctttatagttttgcaaatctctttaatgtctgacttaatatgttaattaaatacagttgttaaaagtgctgctaagaaaaattccatgatcccatgagagatataaaaggatacataacatattgcagttgattgcagagtaattccttgaggaagtgacatataaattgagatctgaaccatgggcaggagggagccaggcaaagagaaaagtgctaaagcagaccttaggaatgggagaaatttgatgcatttggataatggagggaaggccagtgtggtttgaatatgttgagtgaggggaagacaggctcctgatgaagccagagagaagctgggaccagagttatgcaaagctttagggtccatgtggactagcgtaggttttattctacaaggaagggggaccactgattggatttagaaagggggtgttagggtgatatgacccaatttgcacttcaataaaatatcactggctgcttatggagaatagactgaagtagtgggagaatggatataggaaaacagtttaagaaaccagtgtagcagaatatgcaagagatgatacatatttaggaagcagcacaaagtggaactggtgattgatgggatatgggcgatgagctcaaggaaagtgactcatgttttgtcttttcttcgactcatctgtcttcatctaacacacatgtttttgttcttaaatctagtaaaaaaacatcaaattaggccatgaagcagaaatcctatgtttgagctatgggcttggatttgttgtcattacctgagtagaaatttaggaagcttgtaattgtgtattctttcagaatcatcgcattttaacattctgtatcattttacagatgtcacaaaattggacttttaaaagaaaattattcaacatgctaatgctttaatatagccattacttgaactagtatttgtgtagctggtgaaactatcacacttctcctccttttgctcatttttatattctcggagctgggtagttggataaaatggaatctgtccatcataacagtagccatcctgagtatccagatgtcagggagtttctgccaggaagggaagacagctgtttggaatgggaagggagtagaggatactgcaaaacatgtcaagagttttatcaggggagtgagatgacagttggtagcaggaaagggtaagcagacactggaacatgtctggaaaaatcaattttgtttgtggcttaggtgatagcctaagacatttaaaaatgctctgttatggaaccctgcatttgtctggattatctatccaaccagccttgtttaagtgcgagctataggattagcagatagtaaacatactctaagcagtcagcttagagtagagtatttcagctcagtattaggtagacagtaaaatgaatcattttctaaatggtttgtgagcatttttgcctataactttaatatatttgggacattcaaatattctctcttaccccagtgaagaaatagaacatgacctgtcactgttaaaaataacttcagacaggtaatgaaataaaacgtcttctgggttttagctttttcactgaattggtattttagttttagctcttatctgtattagtatttgacgcttatctcggaaacaaacaaacagatctgactcttagaattgcatgcagctgtcctagactgtctttagatcagtcttctaagattatcccagcaaacttcttcaaattgtcacagtttctatataaattctctgtttttgaaatgtattaaaacctaatgtagtatgcagtcttgtgggcaactggccagcactgcttctctttcatggtcaaagcttttggctggcattctgaaatacagtttcagtgttgatccccctttgatcactgtggaccagagtgaaaaatactttcttattgccatcttgacctacaaagatgtgcttgatatggggtgtgttcattttactgtaattacatgtgccaaatacttggagtgtatgtctttatttatcatggtaactgactaggcctttaaaaagtcatttacttttggaaaatagattcaaaattaatccaaaaattattcttcttaagtgtaaagtctttaagtgttctctcatagattattggaaatttcgtgttaccaagcccaggctctgtacatgttttgtgtacggaagggaagagtaattatgtagaataagtgttaactattatttgctcttcattctgaatgttgtcaaccaaggtgattgctaaagctattcattttaattaagtagcctattgcaggcatttattagacagactcattgatatttcaacagaggcataggtagatatttcttctatccacatttgatgcttctgtgccattttattttattttattttattttttgagatggagtaccactctgtcacccaggctggactgcagtggcgcgatcttggctcactgcaaactccgcctcccaggttcaagtgattctcctgccttagcctccctagtagctgggattacaggcgtgatctctgctcactgtgacctctgcctctcaggttcaagtgattctcctgcctcagcctccctagtagctgggattacaggtgtgcaccaccatgcctagctagtttttgtatttttagtttcaccatattggccaggctggtctcgaagtcctgacctcatgatccacttgccttggcctcccaacgtgctgggattacagctgtgagccaccaggcccagcctattttttttaattgaatgaattacttttatcttattttattttagattccaggggtgtgcatccaggcttgttacacgggtaaactgagtgtcgctgaagcttggtggatgaatgatcctgtcacccaggtagtgagtatcgtacatgattggcaggctttgaatccatgtgcccctcctcatctccctcctcaagcagtcctcagtgtctcttgttcccatctttgtgtctatatgtattcaatgtttagctcccacttataagtgagagggtgttgtatttggtttcctgttcctgtgttagtttgcttaggataatggcctccagctgcatccacgttgctgcaaaggacataatttcattcttttttttacagctgcatagtattctgtggtatatatgtaccacattttctttatccagttcactgttgatgggcatcttggttgattccgtgtctttgctattgtgaatagtactgcaatgaacataggagtgtacatgtctttttggcagaaagatttattttcctttggttatatacccagtagtgggattgctggtttaaatggtaattctgttattaagatctttgagaaatttccacactgctttccacagtgagtgaactaatttacattcctaccagcagtatgtaagtgttccctttactctgtcgcctcaccagcatggtgtggcttttagaggttttgacagttcagggaggctcttcagaattctaaaattctgataagcacggcctaaatatttatgtgtagtctaagaactcaagcatagaatactatgcttttttagttttagttttttttaaaaagctttcctttgtaaaatcaaattaagaaaggcagcctggtgaagtaaaaggatagctgtgttgaaatttaaatgacagcaagtttaggatctgtatttagaaactatttcatctttagtataatgaggtgattagactaatacaatttgttgcttgtttgtaagttttttagtttggcagtacaattgctttttcaaaaaaatgaaaaatatgaaactctcaaataagaaagaggatgaaatcttggaccttctgtttgtagtgagggtagggcctggaatcgtatctacttagcttcccattgcgctagtcacgaccaccctctgaacctcttattacatgagattattctgcatgacacctatgttccacacaccacggttgcaggatctgtaggctacctgaaccatcccatttttcacatataaaaatcttcagtaagtatgttaaatgctttccatttatgacttagagataggagatgtagataggcatgctttctaaggatatcattttcaaattgacatgtccttgttcctcttatgctcctgatactctgaatagttttcatctgctaattaggtgatcacaatcaggtaatggaatattgaaggaatgtatttgcaatctgtgaaaataattcactgatgatgtctacaataaaaattctggtttccatctgtttaattatggggcatatatttaggagatgttatggtaaagtgtggagaaggccaaaaatatttgagaggccatgcccttggaggaaaaatagtcttattggaaggatagtgggaaaaatctgttgttgggattcattggaaaactgctccttccccatcctgtatggttgtggtggaaatggccagtgtagtggcctgtgggagcttgacttgggtctgtccaatgtctgaatcacaggaatatgccccagcgattgttccaggaagctgaagcatctcccatgtagctgtcagtaagattgcttcggtgaaatctgatctatgtagagagacgacttgacacaaaaaagctgtgggtttgggatttcagagtctgctcatggaagaagaatatgaggccaaaagctgatcagagacaaacagaattgggagacggaaagaagcagatggggggagagagagcaagaaagggtatgtgccttgatccagatttgtctcatgttctctctatcattggaatacctagttatataagccaattaattctctttctagttgaggctagtttgatttgtgttcttgtcatcgtcagccaaggaatcttgaataatcaacgcaataaaccaatgaagctaccataaagtactaggtactttgagagggacacagatccctctcttgcttttctttcaggtggcatgaaagcatctcagtattaaacattcactgggcactaggctgatggcttctggagttagcaaaatccctgagatagacagctgctccacttggaacatcctcaggaacaaacccggatttgctggtttcttagaaaatcattagcgcccaggattgctccgccatgtcctttttctttgtctattctgaattctcacatcttccatttcatcttgtttttctcatatcctgtcccaggcccagtattatttcctgtcctctgtcccagtgatatttcatatgccttgcaaaccatatttattttcccaaactaaataatattcctctccccatagattttttcttatcttactaattcattagattgttattttagtgcttaaacaacacttagttgtcttcagagatatttctgtttacttatatgtctcccgttatgtgaaagagatatgtgttttggagaaaataccttatattatcccaaaatagatattagtattatttcaagaggtgtgttctatctgaagctctattacagacaagggagtcttctggtgctttgaggtctgctgtcatgtacattagctaaactttttaaatccaacaaataccctaacgtttttatactaagttgtttttaattctttctaccaaagcataccacttggcgtcctggctgcatgtccctatgttgggagtgcctcagaggcttattttctgaaaataagggtgtgactggagccagtccttgttttaaacaggctccataccttaaattggttttcactgggagccttaaaattcatattgatgagtgaaagctagaaatacaatgcaagtttgaggagaagtgttttctgccaagtgactgcaaggagccagcagcttaaaacaagtaggtaggaaagaatgtgaggtccgatgctgggcgtgagcagacttggccacagtcaattaggaagaatttaacctagtgtactattatctcaaatcagaaatgtgatcgatgcatgagaacatgctatccaaataagtttacgtgtgtatatgcatgtaaatgtactttaatatgtatatattggcctcatcatatgaaaagcgaacattaaaaagatgtcatgacaataactttagaaacagaagcctggagaaccagctaaggcaacttgtaggctcatctttgggagagtggttttccccagtcagaatgccttaccccattgatctcacatctttatttcatttcaaccatactctccttccccaacaaaacctcagcacttaatgataccatcataattctttgatttattcacagtacatgcacaagagtctcagaatatcgataccagtcctactacaaataatttaattaccatgagcagtttagagttttcctttaaattgttatgtatcttaaataaaatcgctagaaatagcacctctgtgagtgcttatgatagcaactggatatgaaattaggtttattttactttcaatttatagagattgcttttttagatttaattttgcattataattatgtagaatatttatgatttcagaatcaatctataaaaccagtatgttcaaagtagtataacttctatatctcccttatactctgtttcttcctcccccaaatttttaatacttactctgtttattaaatacaaatacaatatatacataaggttgcatatatgtgtttgtatgtggatatacatacatgtatgtatataaatacatttatatttgtgttccatcctttctttgaaaagttatatatactctatacatttttcttcaactttctttcgttctttagaaaaatagcctggagagcatttagttgcactttctagaatgatttcttttcttctttttcctcttcctcctcttctttttttttttttttttttacggttttatagtactccatcatgggggatgtaccatgtttttttctcactccatcccctatttataaacatttttattttcaatctcttgttattttaaataatgctgcagtgaattgctttgtgcaaacatatattttatctttgctagtgtgtcttttggatagactcccagaagtgcaattctgtgtcaaaggataaatacatatgtaattttgctaggtattgatgaacacttatccatagggtttgcatatgtctctttgtatttataccacaactatataagaattcctagttccctaagtctggccaacatactatattgttgaactttaagactttcctgtcagataggtgaggaatgttatattagtattgttttcgattgcatttgtcatattaacagcacagtccagtgtattttcttatgtttaaggcccatttgcatttatttatgagctaatcagttcatatttctcactcatttttcagtgtgattttgggctgtttttttcctgattttgcagccctttgtatattggggatttttatctctagtgaagcttaccaatgtgttctcccaatttgtttctggaatcttttatgtaatcactggtatccatgtttttccttattactttgggattttaaataattgttagaaaagttttccccattcctaggttattgagatgacatattaccatgtttttttctagtccttaattttagttttcatagttaaatagttgatccatttggaatttatcctggtttaaagtctaaggaatggatctgattttacctttcttcatgtgactatccacttatcccaacagttcatatcaaaactccatcttctccccagtgatttaaggatagcatatttatcatataccaaattctccattcacttgggtttatcttttacctctttttggaaagagtgaagaaacttttttttggtttttgtttttgtgttttttggattgatacttaattttttattttaagttctgggatacatgcgcagaacgtgcaggtttgttacataggtatacgtgtgccatggtggtttgctgcacctattgacccatcctctaggttccctccccacacaccctccacccccaacaggccctgttgtgtgttgttcccctccctgtgtccttgtgttctcattgttcaactcccccttatgagtgagaacatgcggtatttggtgttctgttcctgtgttagtttgctgaggatgatggcttccagcttcatccatgtccctgcaaatgacatgatctcattcctttttatggctgtgtactattccatggtgtatatgtaccacattttcttgatccagttcatcattgatgggcatttagattggttccatgtctttttcaaaagccctattgaatggtttttcactcactttccttgttggctgaaactgggtcacacaactttcctaaacaaacaaatcctttgcagagggaatgagatttttactattggctcaacagagttcttggctctggaagatgggtggattgtctggaccaaatcaggagtaggaatgtaagaaagatggtgagatggtgagaggaagagattgagaggagtatcacatagtgaatgacacatttgtatgtctttctggaccataagcttcttaaggtcacagggttctaacagatcatcatgtcatcatgtcatcatctccctagccactgttacagtgcctagacgtaatatagctgtgcacatacttgccgaagagcactgagttggaatactactaaatgtggctttatactaaactaaataaaccaagtagtttggtttgttgtgtttcaccatatagttacagtatagctgaaataacatattaaaaatatgttaatcactaggttcataaggcctgaatacattgggtaaatgttttggcatttgttttttaggttctattttgaaatttgaatgatgtatttagagtacccttattctgggacttccggtatatttgataaatattctttatgtctgagtcgaagtggacagaaagcaagtagactataaatgtccttaaaggcaaaaccagtgtgttctctgtcaccccaatgccacctagttctgtacctgaaatattgtggatgttctcttgatatttatcaaatgaatgagtgaatgaatgatatctccattttacaggtagtcatggaaacttagagctaaatggctctctgatgtcattcacctacaaaaaaggtctaaaatttttgcccacacagaaatcgattgcctgtcctggtgattattttctttcatattctcagagctatacttttatagtctgcaaacacagaattatactattgagaaaccaagcttttgtagaaaataataaccaatgctttgaaatgaggattatttcttagcaaatactgaaaatacatatgttggatatgaaagaatgagttggttcctaacatgggactaatgcagaaaaggggctaaatgctaagtgtaaatttaaaattactcaccatattggcctttgccttaacttcttttctcataatgtgggcatttaggattttcaacttctcagccatcctagaaaagtttgacttttatatgatgcttaaatgtcaatatctaatttcagaaaatgaatttacaatttggggggaggtgatttcagagtacactttgcctacctctgatttggcaaaggatcaagaaaatttgtcgagttctgaaagcctgcatcttttaataagcttcttcaataaaaatgtgattaaaatgtttcataaggttaaagtgttgcctgtggcagtggaaatttcctcagcttaacacgtcatcagtatgacatatcacgcttgcctttgtcagcagttcttgtacacagaaaaagtgtaaacacatttaaaatgacagatttaaatgtatcccaatagtagaggaaccactggtaataggtcataagtaaagtgtttctaataaaagcattgctgtcaagtactaagtgaatcaggttggttgcctcattgtttgttggatatctatactcttgtctcatgcagtttgctcttaccagctcctcaccttcctgagctgtaaaatttaatctagtaagagattacattccaaattgcatgaagaaaatttcaaatttatctgcagaaatgatgcagcctctcttctaagaatacattacccctaccatgtccttaccaaccagtatcttgagttttcatgttttgtaagcctatagatttttcacacattctcatgacaatgccctaaaacatatcagaatgacctttttatagaaacaatgagtggaactcacatacgaattctataggtttctgactttttaaaaagcaaatcatagcatttttattgagtgtcacggtagtcacatacgttgttctcatcaccgccatattaaatagtatgatttgtcggcggggggactgtggggtggtgattctaaattcgctttatactcttagtgcagctggatctaagaaaaacattttaaagtttatcagaaactcagtataattcagaacaaacaggattaggtttggaaaaaaaatacagatatagtaagaaaagtgacccatatagaagcctttcgaggtctgttggaaggccattattgaaaggaaggaaaggtgtaggttgtcagtggtggctgattgctgaatgactggacacgattgttgagatggctgtcttatattttgtatatcaaaataaaactttctagaaattttcttaactaaaagtaaatattctaatttctaaatttttatattgactttttcccctctttttttctggatgtttattggtacagagacacacacacacacacgcacactgacacactccctacttatttaacacatttgaaatagcactttgctggatgaggaagtacatatggtcttcctaggagtgttctgagacttttttcaaatggtttttcctttatcccatatctctaaagatcactttcatcccacttagttgtgtatgtatgttttcacacacatatatccttttgaggtgggtctagtgggaggtatctatttttactctttaccgaggtaagggtttccatgaaacaatgcaaatatatgtgaaattaaactagaatagtaattgcaactggagcgaactaaaaagtacagtggacaccaaattaaattaataaaagtacgtggtgtggggatttttaaagggcagcctcttttattattacacacacacacattcagcaatgtactctattgaaatagcctgtccacttagaaatgcttaccgagttggcattttctttaaacaggataatttaatggtagaaccgtccacctgttttgcattctttaaataattaagctaatcatacaaggggtcctgcattccgtgattgataaattcgttttggtgcagcccttgcctctttcatgccttagagagcttagctgtgatgcattaggtttaattcttatagtcttgtgttttttttctggcatgttaagtcaaaacaaaagaaaaaaattgtgcttttggcaataaatcgtggcctgctgggaaagtcaacatctacccagatttgccaggtggctattcagaaactctcataaccctgaagtctgaaagagctcctttacatctgaagctcagatacacagaataacttacatagggtgtgttggactatggttttcttatcataagtactggatcttagaagagcaaagggagaaatatggtgccctcttgattttaatagcagcaagaacaagaaaatcaagggagaaattactggaagatcatctacctgggctcatttttaagtgttataattattattattattattattatttatttttttttttttttgagacggagtctcgctgtgtcgcccaggctggagtgcagtggctcaatctcggctcactgcaagctccgcctcccgggttcacgccattctcctgcctcagccttcccagtagctgggactataggtgcctgcaaccacgcccggctaatttttttatttttttatttttttttatttttgtatttttagtagagacggggtttcaccgtgttagccaggatggtctcaatcacctgacctcatgatctgcccccctcggcctcccaaaatgctgggattacaggcgtgagccaccgcgcccagccttaagtgttatttttaagacataaagtaagttttaaaaacacaatttcaccaaaaatgcataaatatgaccatgaaattcaagaatacacatacgtattcatatatgtaaatgtatgtatgtgtatttctgaactttgcgtcattttgttcccatgttttcactcggtactatcccattcccgtacacatgacccacctcatccaccatgctctatcctccctcttcctggagtgctcccagaatcctcctcaggcaacaacttccttttgaactccccaactcctttgctcaaatactgctttttaggtggctctatcctttggctcatcatttctggtgatgaacaacctttatctttccaccccagtgttagataaaagttattatcttatacttgtgccaagatgcagaatttgggacgttctgacctatgattatacttgtgtatttgtcaacctgctaatatgttaatacatacgtgtatttatatatacatatctggagagatttttcagtcattgttttacaaaaatggaatattactcattcttttatctttcaataattctttgaggaaatcccttcaaggctactgtataaatctaattcattatgtccagtggcggtaacataattttaaaacattttctgctggtgggatccagcctttgtgtggttttgttttgtcttatcactgtacaaaaagctcatataattttttttttttttttgaggcagggtctcattgtcacccaagctggagagcagtggcgcgatattggctcgctgtaacctctgcctcccaggctcaagctatcttcccacctcagcctcctgagtagctgacactactggtgcatgccaccatgcctggccagatttttttgttttttttggtagaaatggggtctcactaataacctacttttaatgggatagattgtcagccatgaaagtactagatttaagaaaatgtactttttaaatattgataggtattgttacattacatttcataaagccttaaaagtgatattttaatctaccatgtatcagaatatccatttatctaaatccagagcaggtatttccccttattttcatttgtattagtgcattaggtctaaatgacatctcattgttttctctaacattttctgacttctattaaatttgagcatcttttcatttttattggctttttatattgtcccaccttaaaaataccttttcaggctgggaagggtggctcacccctgtaatcccagcactttgggaggccgaggcaggaagattgcttgagcccgggagttcaagaccagtccgggcaacatggtgaaactccatctctactaaaaaaacaaaacaaaaaaaaaaaaaaccagaatattagctgggcatggtgatgcgtgcttgtaatcccagctactcagaaggctgaggtgggaggatcgcttgagcccagggggtggaggctgaggtgagctgagatcatgctactgtactccagcctgggtgacagactgagaccttgtctcaaataaaataataaaataaataaaatacctctccatatatttgcccattttttaatttctcattttcacgggtacatagtaggtgtatatattaatggagtacatgagctattttgatacaggcatgcaatgagtaataatcccaccaatgtaaatgcagtatccatctccctaagcatttttcctttgtgttagaagcaatccaattatactcttttattttaaaatgtacaattaaattatttactgtaatcaccttgttgtgctatcaaacactagctcttattcttcattctttctgttttttatactcactaactattcacccccctccccatgacccttcccagcctctgttaaccatccttctactctgtcttcacaagttcaattgttctgatttttagctcccactaataagtgagaacatgcgaagtttgtcttcctgttcctgtctttgcccccatttttttcttttagtttttctttgtccccttcttgtctatttgtgaaattgtgttgccttttgtggatattaactatcatctctcttgcatttttttctaaatcaaatattttaagaatgatttgctgttcataccagtgtgtacatatatgtttttgtgttcttaaagatcagttccaatgggctgacataggttgaccaggtaatagttattatatagttgcacagagcagtgcatctggagacacagacacatcactaaaatcttttttgtcaaaactatgaattgcaaaaaggagctttcagtgataaaaactcttggtgtgacctaggggaaaagggtcatctcaggtcctctaaatatttttgaaagagacagtccttatttcctgggaatgaatactggtgacttacatgcctttgttgagggatatttattatcatacaaatattttttgaaggagaggtgttcactgatgatgaaccgtgtcattacactattcctgaacttttacaattactttttaaatcttgcttttgaaggtataggtttcttaattatttggtggttgtcatttttttttaactttgtgttttgaaataattcaacattcacaggagttgcaaaaatgcaaagactcacacacacttcatgcaaactctctatagttagcatcttgcttaactgtagtaactatagtctcatgtaagaactagaaaattaacattggtacaatccacagagtttagtcagattttaccaattttacagacacgtgtgtgtgtatgtctatgtacttctattggggttttttttttaactgtaatgtgtcaaacaaattactctgtcactgaaatcctaagctccacactcataaataaaagtagataaaactgaggtcatagacaaagtagggcatgggagtagctttctgactgatgctgtggagtgccattctgcctataaccttgaaaaaatatctacaaatgtgcctcaggttgtcatggctccacttagacctgcacgaagacagagcgtacataaaacccccttttgatcttacaaagttgatgattcttggccttatgatgggaaacagagctcagtacttttaggctggctggtagggaccttctcttacttaaggataaataaataatgagtgtttgtgaagatatgttctcctgactacagtgacacctgctgagactgtttggattgtaactttatagcatccttttccagaattagttacacatccacaatcaggcaaccataactactctaccaataatgtctcatgtacaactgtgaacaagtaaattaatgccaactagtgcctgaccacacaccgtgacaaaggatgtgtgcttgggcagcagtaccccctttctctttatgaattgtcttaggagctctctaggagaacttgaaaggagtcaggaaaatgtggaggaagcattgctttgcccctgcaggaaatgcagcttcaaaatacttccatgttaatagcatccattgacttcagactgagaatcagaaacgagtgctactaggtcattggtccaacttcctcatttttcttgtaagtaaatgtggtccagaaaagtgaagtgatatgctttaaaggcacaatgataattagtgacgaagtcttgactaaaattccagctatcttcctctgaaaagatgctctttccactgtaacattatagcactttgttcatttttatggattgaatgaatgggttaaaaagtcaaaacagtctacagaatttccaagattatttttctcctctttgttcctggagtatcctaagaagacatatgtgggcaatcctgggacaggcagccatctcttgctatggagaacttactggtaagagtggttttggtggctgtaatgcttatgctgagctaatgtaacaaaattcagtcaagaatttctaaaccattctattttttttttttctccctgagactccaaaagaagtttaactggggtctagttaggatgtttgaggaaaatttgggtagtcttagatccaatatattttagatgaactcagctatttattagtattgactgtttaaaaaaagttatgagataggttaaatatacacagaagtggactaatcagtataataaatcccatgtaggccatgaacttcagtactgcaataggtggttaattattggttttaaaataaatatgtatgaatgattctgtttctttctagatggcccttccattttgcagagagaaagggttttttggggggtagggtggttgttaaatgattcttttcttctgattatctacccagtgtagcatctctcttcctctgaatggccctggactttaagatattctacttgggaggctgaagtgggaggatcacttgagcctaggagttcaaggccagcctgggcagtatagtgagaccccatctcttaaaaaatagatagtattgtggtttgtattggcactcagaaatacaaacccacaatgtagaatttagaatgatgattgaaatctaccatagacgatcatttggtatataagataccattgggagccacgtttcccaccgtgagactggcctctgttggtaaaatcagcagtggaacatacgtgttgttatacatagtggtggttaaatggctaaaccaaacataaaacccaggctagagggagcagtaaagaccaaaacttagatattatggtctctttaaattggactgagtactttccacccacgttgttctattttaagttgggtaagtggttgtcttcccagctgaactttagtaagttatgttggagacagggaccattttatttttgttgcttgtctgtccttaatgcctggcaataaatgttgatgtttgttgaatggatgaatggacagaaggatgggtggttgaacaaaggagtaaagaaagacatcttgggaaataaaactgaatcagtagcctcaacattgtagatgccagtgtgtggtgtcagggtgtttcaaaggctggcccatttttaaccgaatatcatcaagagcagtgtagcattaaaataaatcattctattattgcctcaggtcacatttttggaacctaattaaaagttcaatgacagcctttttttttttttcccccaaaagcaacaaagggattctgattccagaagaaagacactggtgcttcagtttaatgctgtccctagagttcaaagcatggatgccctgtagaggaaagaccttgttagaagaggatccttttcatattttaatgatttaattaatttttcccattttatacaaaattacattctctaaaagtaattttggtcatgtataggaaaatgccagggatatgtcctagagaagggggaggtcaaaagtagattgtgacccactagaaattgtagtggtctgctgagtattatccacaagagcaaatccaacatggtagagcagaattcgtagaattcatttagctcattagatggctgtcaaacatcaggccctaaaatgtggaaaggggatgcagagaagggaaattgattatcccagtcctgttggtaacagaactctcattagcacgtcagggagcacccacaatccagtgtctctgcctttatagcctggacccagtactgtcctctggatggagacaccctgttcctaatcccatccctagtgtccaagtcttaccttgtctatgttgattggttatcccgtggtgtgttctctaggtcactcactttcttgatcaccctcttctgaatcacacagtgggttagtaaaggccttaaaaatgttataaggtacaacaaatgcagaataaaaaccctagtacaacaaaagaatattagtgtctgtcatctcagttaaggcaatggagttatattgtatactggtatatttcacatttttagtcccctatgtttgacacccccagtttgaaacacaagagtaattctctctactctctccttaacacagaagaattgtaggttacctactcagagttctcataggtttcttctttatccttgagtgcttttgagtttatgtttaaataaaaatctttctaatagtcttatcattgaccttgaatgttctggaaatttaaatatctcaggataaaaacataacagaaatattaaactcaaaggaatcctgaagccagtcttaggagaaactacagaattgtaggccttttctgtcttattctcctgacattaattctctccctattacccctcttcattttcccaccacccacacaaagctgggaagacatgacatttggaacattcccctttgaggacccacaattaaatgacaatgaagtgagctggcagtctctcaactcctgtgattccaaaggctcccaatccagaatgtttctaactgatggtcatgagtcactgatggattttgaattcaatttagcctgtctcaccaaacttaaaaaagaaaaacaaaattttatataatagatgatgtcagagagcatcacatatagtatgacagtttcatgacatcagctgtctatatgttctagattatgatgtaacatgttgtcaggctgctctactagttcattgttcctcccagtggaatggggaatcacaggaataaaagaccaacttttgtcccaaggtaatttttagtacctggctttccttggctggctactaaatccactgtatttgctcttcttttgcacagaaataatgaagcaccaagccttttccacttctaacaatagcgtgattcctctgacaactcctttagaaaacaatgccttaacctgactacagaaaggagtaaatattttagactgctacattccccattacctgagaggaaatatgttaatgatcctgtgctccacttagtttaaattttgttctctgcagtaatactgttgtagattattaataagccttcattccttgtgagacaattcgttacctttacactggtgcaaatgcatttttcagtgattctctggaattattccattcaaatatgaagaatttgccaaaaagatagaaagagagattgagaaattgaaacttggctaggtagaaaatggtaccagagctgcaccgcctcccttgggcttttctcataaccataagttgacggtgatggtattttgcacgtgggacttgagcataccaaagggaagaacatcctcagtcctaatgaatgtgctgagcctattatgtgttcaggcagtctccctggaataccagtaaaagaaaattaaacaactcacgacagctatcttgcatatctcacctgggaaggtatgcatgcagtaggacaggcactgcttaacattaatcagcctcctgaagtcattacattcatgaggaaatgtaattcacatgtgattactttttaatttactctgtaatcacattccaagtgaacgggccaagcttaaaatgaaatttaaaagtcaaatactgctttgtattaggaattcacaatttttatatgcacttaggttagtaaagattttacaataaccatttgtgactgagcatatgataattttttgatgaaagttagtgccatacctaagataagatgtatttgatttctctccaagtgctgaactggacctggagagtctcagaactctactctgtagtgaattcctgcctcatctaaactttatttgaaaagaaaaaaaagtcatccaaacgttcctcaatcccagatctgaagttgcgatgaactaatgtatttttaattcctgctgtgcctgtgaggcatatgcatttgttttatccatcatcagaaggtgtatacagaacctcataataactgatttcagctcatcaatggggaatgccagggcctgcagtaagaatcttcctccaacaatgtggtctttcaagtttgtgaagttacaaagctgctgtgttggtttcatgggagccttgaaactaaaggttcaaaaggccagaaccagctagttatggatagtagtgggtaggtttgtgctgtgctttataagccagaactaagggcattggagagaaatgtacaaaggtttttcagatttccagtcaatacaaagaagaaatgtttttcatttgaccccctctaccactacattgaacaacctcggaagtactaagataccctttccagaaaatattcaaaagctggattccattttccagggatgttgtatagtgttaccaaacataggttattagctttgaaatttcaagatatttgtaatacctttatgctaactttactaatatttactttagctcaactcattttgttttcacttcacaactgctttggcattgttttaatccagtactgttaaaataaatataatgcaaggcacatgagatttttgagttgccatattacagaagcaggagaaattaattttacattttatttaacccactgtatcctattatttcaacatgcaaatcaataagaaattttaaatgagatttctttttttttaatgctatgaaatcttgtgtgtattttacacttatagcacatctcagtttggactagtcacagtttacattgacaagagccacatgtggctagggactactatgggcagaatagttccaagctgtggcatttatgaaatcatgactgacatgatggttatatatttttaaatgcatgttaagtatgctgcttttcgaattttaaagtttgaattagtaaatggaatatgtaccacactatggggaacaccgacttgaaaagcagttcttttatctgtctacgtatatatgtatctatctatttggggtgcagtaatctacatgttggatggagtttatatgcatggggtgtctgcatggctgtatgtacttacctgtggtccccagtacatgatccatacggctttttgcccacacaaaagcatagcaaagtataagaaatgagactaatataatcctgcttgatttttttttttacaaataaaacatttactatcatagtatgtatatattgtatatatgtatgatatcatctatgtaatggatatgtgtgtgcatgtatatatgtgtaatatatgttatatatgtatgtctgtatatatgtttatatgtatgtatgtatgttacacatcctaggccattgctgcttccgtctgcacttagggcgggtgtgtggtccctaacccactttggtaggtggaataatgatcccccaaagaggtattaattctaatccccaacacctgtgaatgttaccttacatgaccaaatgggctttgcagatgtgattaggttaaaaattttgggatagggggattatctggtattattcaggtaggtccaatgtattcacaagggtccttataaatgaaagagggaggcaagcgagtcagagtgagagaaggtgtgatgagggatgcagaggtctgagtgttgtggtgtgagcaggacttgacctgatgttgctggctttgaagatgtgggaaggcaccatgaggtgaggaatgtgggcttcctctagaagctggacaaagtaagggaatggattctgaactagagcccccagaaggaacacagccctgcttactttttggttttaccccagtgacagccatttcagacttctgacttccaaaacgataggataaatatgtgttgtttcaagccctaagtatgtggtaatttgtgacagcggcaataataaactaatatgtccatcctcagtaactggttgattaaaactgtatcactttcaagtttttttcgtttaaacaaatttcaatagctttaggggtacaagtaggttttggttatgtgatgaattgtatagcagtcaagcctgaaattttagggcatgcatcacctgagttgtgcacatggtacccaatatgtagttttttaaaatcccccacgcccctcccaccctcccttctgagtctccagtgtccattataacattctgtatgcctttgcatatccatagcttagctcctctgtgtatgtgagaacacgtggtatttggtttttctttcctgagttacgtcacttagaataatggcctccagttccatgaaagttgctgcaaaagacattatttttttcttgtttatggttgagtagtattccatggtatacatatatatatgtgtgtatatatatcatgtttatatgtatattaatatatataattatatatacatatatataattatatataaatataaatataattatataaatataaatatataaatatatatatatatatatcacattttccttatccgcttattggtttatggtcacttaggttggttccacgtcttttcaattgtgaactgtgttgcaataaatatatgtgtgcaggtgtcttttttgatctcatgacttactttcctttcggtagaaacccagtattgggatcgcaagatagaatggtaggtcaacttttagatctttgagaaatcacgatattattttccataaaggttgtactaatttcatttccaccagaagtgtataaatgttcccttttttaccacatccatgtcaacatctattgtttctggactttttaataatgaccattctggagggggtaaaatggtgtcttactgtggttttttttggttgtttgtttttgtttttttgagacaaagtctcattcttgtcccccaggctggagtggaatggcgcgatcttggctaactgcaacgtccgccttctgggttcaagtgattctcctgcctcagccccctgagtagctgggattacagctccctgccgctatgcctggctaatgtttgtatttttagttgttacagcgtttctccatgttggccaggctggtctagaactcctgacttcaggtgatccaccctcctcggcctcctaaggtgctgggattacaggtgtgagccaccgcacccagccctcactgtggttttaatttgcatttccctgatgatgagtgatgttgagcatttttttcatgtttggtggccacttgtatatcttcttttgagaaatgtctgttcatgtcctttgcccattttttaatgggattatttgttttttatccttgctgatttgtttgagttcctagcagattctggatattagtcctttgtcagatgcatagtttgcaaatattttcacccattctgtgggctttttactgtgatgattgtttcttttgctgtgcagaagctttttagtttaattaggtatcatttattcatttttgtttttgtttcatttgctttggagtcttagtcatagattgtttgcctaggccaatatccagaagagtttttcctaggttttcttctaagatttttatggtttcatgtcttagatttaggtctttaatccctcttgagttgatttttgtatatgatgagagataaggatcccgtttaattcttctacatggggctatccaggtttcccagtaccatttattaaatagagtgtcctttccccagtttatgttttttaatgctttgtttcagatcacttggtcctaagtatttagctttatttctaggttccctattctgttccattggcctataaatctacttttatactagtaccatgctgtcttggttactattgctttgtagtataatttgaagtcaggcaatgtgttgcctctagatttgttccgtttaggatttctttggctatttgggctctttttggttccatatgcgaactttaggattgagttttctatttctgtgaaaaaaatggttttttgataggaattgcattgactctgtagattgctttggataatcagattatgatcattttcatgatattcttccaatccatgatcattggatgtcttcacatttgtgtcgtctatgatactttcaagttctttagattggaaagcgagcccattttttaacacccatatcaaacacctcttttcctgggatgttttcctgaaccactttggctgaggtgtgaggactctctccttcctttcctgcccccatgttctcattactggcccctgacattggacatatcacactgtgctacagtcatatatgtgaaagcctgtgtcccccactaaactgtttgcagggtcaggatgtggcatctccacagccagcacttgattggccccagaaatatttgaatgcttgagcaagtgcctcaagacttggatcttacctttctataaaatgacttgtcaaggccatggttataggtatgcatatttcttcttttctgcctcatctatgtccctgtgtttgagagttgtccattttctttttgaaatggtctgaggcctttcttctggaagctctttagccaactaaatgatatttttatttagttttcttttagaaattcattatcactttgcagaatatactgggaaattgatgtagagtctcattgtctcctcctctgttagcctggaaagacaaatgcccagacctttgcagcctgaacactggctcttacatgcattgaaacctaagggtgctgagaccagctctgtccctcggcatgtcttctgatgcaggtccattctcagcagcagtgttgctgcaactggtcagtgattatactcacatccgcatttaggcttgggcacgattacagtagttctcgtaaagtgactaagtgcattctaagtgttcatatttctgaagtgtattttgttaattatccttctcatggttgaggattttaaattttgagaaatctccatttttctgagtgcagtctggtgtttacaattctaccttttaagcaaaatgtcatccctttagttttcggtcatcttaccccagtgtcatttagaatgaatgattttaagaacacagagagaatattctttcactggcagtggaagtggcagaccaatcacttcagtagaaacttgtgtcattcaaaattatgaagttcatataacctataaacaattatttgaaaaagctcttaatgtggatcgtggttacgaaaagtcaaaaccaaacatgagtcacgcagcctgtagttatcagttctgctttcacggatggtggtggaatcattttagagggtagaaagttaggactcagagtgtggggtgaaataaagatacatatccagaagttcagatcctgggcaggtaagcagcatgtagggtaaaggtgtcaaatatgagatgcaggcaactctgctaattgaacttggaaatcccatttacttctgaatgccctgtagagagcatggctcaactcaatctctgtgttgattgttcatagatcagatgcttacctctggttacgtgtccacccatacaggagaggtagagtcacagaacggaaactcctccacagccatttgggaggtagggagatgagtctctgttggctttcatgaaaggcatctgccataccccatgtctccagccacagcattcatgctgagtcctaaacctacatctgcatttgtctccttgctttagggctttcagcagccctcagtttacctttttcaaaggccattgaacttttgcctgtctatcctttaactttttttttttttttttttgagacatagtgttgctctgttgcccaggctggagtgcagtgacgtgaactcagctcactgcaacctccgcctcccgggctcgagcgattctcttgcctccgcctcctgagtagctgggattacaggcacccaccaccatgctttggtaatttttatatttttggtagagacagggtttcgccatgtttgctaggctggtctcgaactcctggtctcaagtaatccacccgcctcagtctccaatcctcagtgctgggattacaggtgtgagccaccacacccagccttttacctttatttttttgattgtaggtgttttggtttgttttctgtttggtttgtattatctgaacttttcattttctgtaattggctttgttagtcttttcttttgggtttctcccactgtaaaaatgtttaaaaatgactttttaaaagtattttaaatcattttgctgttttcaatgctttatgttttaaatgaaacatttttatttttaaaatttttaatctttaatctgtctccaatttatttgggataaggtgtgaggtagggttcacattcttttcaatgtcctcactttcccaaaataacatttgttgattaattcatctggcctcatgaatttgcaatgtcatataaaaaaatactacttttctgtgtgtttgagtctgtttctggaggagaggatcatgctttggtcactatgcccttctaatcactacggctttatgatgtggttttgtatgtgagcaatgtacactgccattatgttcgtatggtatgttcatttcagttcagtggacttgaaatactgctttttatcttgctagttagagagatttttgagtagttcactaggtgacaacctgccgttttctaagtacgagactagtcaacagttggttattaaagcagaaaatactgctatttttatttcaaatgtatccctttttctatagcttttaataaaacatgtgtttaagcattatttttgtataaattctgttcttaattttttatcactttgggttgttggcattggtaccaaagctgtatagtatacaccactgtgctgttttcttgatcattgctggctgactctttggagaaaggaaccattgtttttttattttattttatttttttaattgtgggatactgcctcacttaaattagaaggaagtatcaggaagactttatctcctggaagcaaagcagatgttcaataaaattttcttagcttcccagggcctcccagtcacaggaaaaagacacaacttcaaaatctcccttagtttttttttgagatggagtctcactctgttgctcaggctggagtgcaagggtgcaatctcggctcactgcaacctccacctcccggattcaagggattctcatgcctcagttccccaagtagctgggactacacgtgtgcactaccatgcccagctaatttttgtattttttttaaattttattattattatactttaagttttagggtacatgtgcacaatgtgcaggttagttacatatgtatacatgtgccatgctggtgtgctgcacccattaactcgtcatttagcattaggtatatctcctaatgctatccctccccgctcccccaccccacaacagtccccagtgatgttgtatttttagtagagacacggtttcaccatgttggccaggctggtctcaaactcctgacctcaggtgatctgcctgctttggactcctaaagtgctgggattacaggtgtgagccaccgtgcccagccctcccttagaatttttactataactatcttttggccagcttttaggggtatgtgtacatcacctttgtccttttccaccttttttcttttagtttttcttttttttttttctggtctcatctcactcccactctctggccattagccatttcactgcgtcatttctgagaaaactgtctcagccatctcagaaaagcagttctgactgttatgaagcaaacaaaaataacagagcaagaagtgaatgtgggacgttattttggttctgtgatgtcatcagtcaatcacaattcaactttccaaatgttgtttgcaggtctgtttaagattgtggtattttaactggttggcttctgtatgatgtttgagaatgattaattctcaaaatagtttttccctactgaaaagtagctgacttaaaagaaacatgtttcaaagctgaatggaagtcatcattaactggcctaaatgcaggtcagatgggttcctaagggaaagagcatcctttggtccttcttctctctttgaaacttgaagaggtaactgttcaatgcatacatggcttccacctctaattagtagttttgctgaacaagtgctggattatcaagaacctaaccaaccaactccgaagaatacagaatgttttagaatttaactttcatcagaacaactttttcagtccttagcaaagtagttaactcttttgaaatgaaaaaacgtgggtaaatgtcagagagctgaaaaacgattcatgtcattactaaaacattcacattcaaataataccaatgccgaccaaattctagtgaattctgtaatgatcgcattatcaggtaaaatgtggaggctggtgtttacaagccatgtcttgcaataaatatagcaaatgcagggaaccagaaaagtcattcttctgtggtcatttgtaatctacttataagaaggaaggaagaatgggggtagggcggagttgtagcattcagcagaattgccctaaagtatctaaagtatgaaactaaaagcctgaatgattgattgtgggaagatttcagtaaatgatactcaaattaaaacattaggtgagtgactttaagaaaattacattgccacatgcaatttattcactgaaaaggaacttttaaaataggatgaataatacaaaaaaatccggagatctagttagagaatacaagcttttcttttctttctcctctttcccccccacccccagcttctaaattgaacacctgtcagatttttttttccctttcatttatttgacttgtcagagaaaaaaggtcagactgatcaccagctctactttttaacagacagaagcctgtaattgagagtaattcctctgcaattttgtaggcaggggctgtctcatgcttgctttcaaaagctaggtgaggagagaaatgctggtgttctctaagtgaatcaactttattcaccgggctgcagatcatttctgatttttactgaagtgcagaaagctacagtgctcatattagtgtccttcttttagatgaatagaagtgtaatctatttttaacttctactggggtgccctgcggctaaaaaaaaaattgctttgtgagaggcagctcagaaatgtctcattttgaaattctgcattcttaagaatacaaggtggcttactattttttctttctttgagaagtttccatccttgctcaagatttcacttgagatggaaattgtgcatgtttgtctttaatagaaatagattcaatgtttgtcatcatggtgtgatatatattatgatgcaatgtaaagaagtttggaaaagctgaattaatttctttataaaaatagttactgtcaaaatttgaaggatgaaatgaaggcactccttaactcatatgaaacttcacaaaatctgtgtccaaagctttcactactcattaatggtttcttgtttgaggcaagacccagagaaaaaggaatcattcagcggaaagcatacacacattgaatccaatttaaactcttggttgtgtataattttacaaaatacagtcactttttcaactaaaaaataaagccaaaatatcataatatgtgatagaagcatgtcagcatctacggtgtgatctatttattttaccaagtacaaaagtgaggtggaataacagaaagctgggacataagttgaaaatgtctaattttgaaggaactgaattctgtttgcctttaatgtaataatggtaaaaaaaaaaaaaaaaaaaaaagaaagaaactgtcaagatccctgagttcatagacacctgttagagtctgacattcaatggattgtactatgttgaaatcagaaaacagtgctgacaaaaggtgtagatggtccaagtcatatcattagttatggaaaatgtgcttggaatctatgatgctctgtgtaatacaggtgcatcattttgaaaatgtatggggtaatttcagaggtcactttgataaaccttgcctttttcattattgtcatctaataaccattcatcctagaaccataatatataaaaatccccacataaataggtagaattgtaattttttaaaagcacaattttaaccataaaacagaggagtgattaccagctatgatcagtaaggctgaattatatcatacttagaagagagagatgcaaatgaatgaattaaattaggagcacaattctcttcttaaatcagcatctttgactgtcagaacctggactagagtgcattattcttaatagactgtgatttgtattgaaataggacaataaatctgtttattgaaatttatttgctgcttgttgttcagtttttctggctttgtgcaggagcagggtgaatgtaataggcagggctggtgattcagcagaatgccatttttgtaagtgatcacccactctctagattgaagactcattaacacaaagataggatcaaatattctgcattcactgctttacattgcgtgtttcacaggaaacccgtgaaggcttccgagggcaccagcaatggaacaatccaagagtttccctccatggcctaatttaaaaactgcatttatacttcggtcctcagaggacaacttctcttctaaacttcagcctcatccacttcaattctgtattacgtgtggtaacttcatttgtcttttttctcactcttattttgtgaagccaatttaatgacaggcttgtgatgtgttgattgcagtttgacattagggggtttcacattttgcacgctgactccagtgagaggcttgtattttgtgttccctggccatcatgggtaaacacacagaagaagaatgaaaatgaatcacaatgtataccatttgatcccccacaggaccctctgaaagaaaggttgctttgaccttgtcttggtttgcatattttaagtaagctctaatcacgagctatttcagttttgataaaataggcctcaacactctacgggcatgaactggtaaaatacaaaataatcacaaagctttaataagaaatacacatcagtgggagctagagtagaaagctcccatttgaatttaaatatcttatgcctcctaatttgagggagtgtagaacataggaagaaaatgaaaagatggtggtatttgttaaaaaaaaaaaacaaatacaataaaaacatccatctacaaagtttgcgggcatggcactttccatcctttttacagctcttctgctctaatttctctttcccaaccttagctttatcaatctaacactgtctttccttgttactagagctaatgaggcccgtctatactcacagaggattaatcagtgattataaaccatttaggagatgcagggtgttctgtacgcagcccacctccgttatgactgtgtaacattcttggtttgacctacatacacagtagtgatgacattgccctgccactgtcaagttgctcttggcttcaagttaaaccttcctgttttcttggattttcgaaaatgctgagcctttttgaaaaacagttgactaactcacacaaattcagtcaacctttgacaagggcacaaaagtgactacatggagaaaggataacttttcaacaaatggtggtagaacagttgaacatccactgtaaaaatatgaacttaagcaaagaccttgcatatgtcacaaaaaaactcaaatgaataatagacctaaatgtgaaatgcaaaagtataaaatctagaaaaaaatctgggatcttgtatttggtaatgtgttagtaggtatatacaccaccaaaaacataatgcatgaaaaaaatcgtaagttacacttaattaaaatgaaaacttaagctatgcaaaagacactatgaagaaaaaagccaagccagagtctgggagaacacaaaatacaaatctgataaaggacttgtatccataatatagaaagaacccttacaactcaacagtaagaaaacaaaacaagctaattttaaaaatgatcaaaagatctgaatacatagctcactaaagatgtgcagatggaaaacgtacatatgaaaagatgttcaacgtcacatgttggtagagagttgcaaattagtacaagatgatactatcacacagccactggtgtgtgacaataccattaatagggaggatgtagagcaaataccaaataccaaaaactgacaataccattaatagggaggatgtagagcaacaaggactctcatacattgcttatgagaatgtaaaatagcacaggcgctttgaaagacagttttgcagtttcctacaaagttaaacatagttttaccatacaatccagcagtcatatacctaggtatttacccaactgatatgaaaacttatgaaattagaaaaccctgcactggaatgtttgtctcagctttattcataattccccaaactggaaacaaccaaaatgtccttcaataagtgaatgaataaacaagctctgttacatctgtagaatggaacattactcagcaataaaaaggaatgaactatacatagaaacatggatgaatagtaaatgtatattgctaaggaaagaagctagtctgaaaaggctatctactgcatgatgcaactttattaactttctggtaaagacaaaaccatggagatggtaaacaaatcattgttactgaaggttctggggtgaggtttaataggtgaaacatgcgatttttttttttccccacaccatgaaactattcaatttgacgctgtaaatggtggatacctgacattctgcatttactaaaaccagggtacatttctgcttcacgaataaaccgtgggagcaacaaatacacctaacacccagatctttgtttctaattccatttcccaataaaagaaaccaaggttctttggagaaatggcaaattctgggacttcagcaagaaatatacatgatgagcctggagcacgttatagtgccaagaagtaagacagtgctcagaaaacacaacaaaataaatcacaataatgggagtgtgttaaagggacataggagccaactcaaggagttcccaagcgccaaagatgggtcgcttcgaacagcagaataaacactattgaattataacccaaaatataaaaaaagatttgaataaatagggatggaaataaatgattgaataaacaaataaatgaggtagaattgaaaaatctgtttagcagaattccggatagttctcataaatactgcaaggagctggagcctagctctcacatcttaaatgtcggccacacgtggtttcttgtccaaagtgtacagcttaaaaaggaggaaaaaagagtaacttcagaatgcaaaaattgaataaacaatacttcaaccagtgatcaaggttaacatcatcggtgataagtcatgttgataatatggacgttgctatgatgtgatgagtatggcactttatctttgtggtgttcctcccaaaaaaccatagacatagtgcaatcatgagaaagacatcagacaaaccttaactgagggacttcagcaacatacttgcctcagtactattaaggtcataagaaacagtaaaggtctcataaactgtcacaactaagaaaagtcttaagcaacataagttatgttaatatggtatcttggatggggtcctggagtagaaaaagcatattagattgaaaactaaggaaatcccaataaaatagaggcttttgttaatagtaatgtctcagaggccaggcatggtagctcacaccaagagtctgagaccagtctgggaagcatagtaagagttggtctctaccaaaaaataaaaaacaaattaggtgtgataatgcccggtaatccgagttactcaggaggctgaggcaggagaatcacttgagcccaggagtttgaggctgcagtgagctctgatcacgtcactgtactccagcttgagtggcaaagaccctgactcaaaaaaaaaaaacgaaaaataaattaatataaataataatttatgaatgctagttcaatgattgtaacaactctatcatatatggaagttgctaataatagtggaaactaggtgtggcatatatgggaactctgaactctttataatttttctgtagatttaaaactagtctaaaattaaaaagtaaaaacgttaacgctgttgactgtcatcaggatctgggccacagtaggaaatattttttcttagtaaaagttactggccctaatagagattggacacagttggtcttggttttaaagggattctggggaggcaagagggtgtcggcatcacttaatcagtttccttgattgacttggcattgtcaagttttgaaaagagtgtgacatggcacacttgagcctgtggtgtgattttttgaagtacccagaatgtctgtggaacctctggtcaagtctgtggagcttctaagtgtgtctgattgagggacactgtcagtcaaacttgttagtcacggtgttgacttcaaattgaacaaaacactttcaaaacaatcctccatcataccacttttatttttttgtttgtttgtttatttgtttctttgtttgagacagagtctcactctgttgcccagatttgagtgcactggtgtgatttcagctcactgcaacctctgcctcctgggttcaagtgattctcctgcctaagcctcccaagtagctgggattacaggcatgcaccaccacacctagctaatttttgtatttttagtagagatggattttcaccatgtcggctaggatgttctcaaactcctgacctcaagtgatctgcacgcctcggcctcccaaagtgctgggattgcaggtgtgagccaccgtgcctggccagctcctctgaccactttttcaagatattttacctgtttgaattgaaggtgatactttattcagaagatgtcagagagaaagaactacatatcctttttattctttcaggaaatgggcagagggggagttgtcatggacagaatatcttttaaaggagtggaaccctccattgttttttcttttttttctttttttttttttaaccctccattattttttgactttgtttttctgctttttacacactgcccccgactggcagcatttatagagaataaaaggaggaactaacaactcatttggacaagtattgattgattgattgattgatcaagacagggtctcactctgtcacccaggctgcagtgcagtggtgccatcatagctcactgcagtgtcaagctcccaggctcaagtgatcctcctacctcagcctcccaagtagctgggactacaggtttgtgctgctgtgcctgacttttttgttgttatatttttttgtagagacaggaacttgccatgttgcccaggctggtctcaaaactctggggctcaagctgtctgcctgcctcagcctcccaaagtgctaggattacaggtgtcagccactgtgcccactgggcctctgagcaaaatttaaaatgaaaggaaactaaccaagattttgcctagtgactagatgcaacctaatatgaaggagagcgtctgctgccatgttttgtgctacttaaagatgctaataggcagtgctctcaccaaatcatggaatcattgatatttggtttattgtgagaacagttgatgctgccttgttgaggtaggaggcctgtaggatttgttttcaggtcatggtcccactaatagaagcaggatttagtcaatcccgttttcagatgcagtgaagaagccagccaaaactaccaggtggggaggaaagcaacctctagttgccttcattgctcattagcataaagacactcccattggcgccaggacagtttacaagtgccatggcaacagcctagaagttatctcatatcgttctgaaaaccctctgcccctttttcagaaagttctgcataacctgcctcttacttagcatataattaaaagtccccaccagggattttgtgatcccatttatctaggctgttgcatatttcggatttgtttttcagagcatcatgcataaggtgattgctatgatgtatcacaggtagagatatatataggagggtgtacctccatttcttttggagtcagacatgtaacaacttaataaatgctaaaatatgaaggatataactgtcagaatgagataatgtgacaatatcttgaaggctataaagagctatggaaatgaaaattaaagtcaataaatgcaaaagaaatgcattgagcttttcactttgtgagaccagatcacaaatctgtatgaagattttcaattttaattattaccaagaggctttgtgcttattaaacatgtctttactaacaacctaaactctactctggtcttctgttgatgccagtggtaatagggggtgcttctgacattagaccaggccatgaatcctagcctatagctatatatccttgggaaattcctttacctttttgaacctagatgttcccatctgtaaaatgaggataatctgtaatctggggtcaggcactgtggctcacacctgtaatcccagcactttgggaggccgaggtgggcagatcacttgaggtcaggagttcgagaccagcctggccaacatggtggaacaccgtatctactaaaaacataaaaactagccagatgtggtggtgggcacctgtaatcccagctacttgggaggctgaggtgggagaatcgcttgaacccaggaggcagaggttgtagtgagccaagattgtaccactgcactccagcctggtgacagagtgagactcagtctcaaaaaaaaaaaaaaaaaaattaaaaaaatttgtaatctgtgtaatgattgtagagagtaatagtaatattcctggtgcaactttattttgttacttctcatagctggttggtaaatggtaccatcaatgtggcagtttaactcatggtactttaaagagactgtaatttttcctactcaccttcattttaaaatagaaaatttaaaaatatccagattatcaaatataagtaaatgcttacttagtttgtttaaaatatgtgcagtgttttaaattttgtgagtactgtacaagttaaataagatcaaagtacttgattctttaatcttgcaatccagtaatttagagatggtgaaaattctgtttggttcttccagatacagattaaaattccaaaatttaaatatggcattttatttagattctgaaagataaatgcttatctgtgaaaaagcatcaacgtcaaattataaaggaagacctccatacgtttttacaacatatgccctgtttttctaacagagaattaaaatataaaatgtacattttatattctgaatgcctaagacaaacaaagagctaaaatattttttaaaatgaagctgttagaaacagtacttcaggatatttcttgaagactagaaaaatagtctttggcagatccagtctctgctcgattttgtctccatgaaaattccttcagctttcttttcatttctttcagggactgggattgggatgagggtgaagtgtggaacagcaggtggcccttaattctgacaaacccaaaccatcctgttatgttttaatgatgctgttgcaggtgtgaagtttttctctttctcctttttataacttcagcataagcacaagttgggttatttttgttgcaacagcacggtatattttttctacttttcatttaaaacttgactcactttgctgcccgtgatcttcctagttagaaatcacttcagcattatctcataaattttccattgacgagcttgtgtgctttttgtcaagtctttgtataagctgttttggtggcctaaacaccactgctctccatgctctccagaggctgcttgtcccagtttgtgtggttacagctgtgtaatttccattggccatatttacattacataaatatattacatatagtccccgtggaggattgcctccaaggttgggctctaattcctcagagaatttagaattgtcattcagattccatcttgaatctatttgacctcacatatgaggagagagcaatactggggaattaatggtagctgtttcctttcatgtagcatgcagaacgaagagaacccgtttagagagaccaagatgtcaggaagaaatgaaagatggcctagcttttccttagtgttctagaccagggttctagctggggccagatgcctgttttcatgaccttggatttcttaaacctgaaggaacctatttttttttttacacacttacaacctacagaaacatgtattataacctaatatttgaggtcctgtagctaggtagttgaatttcttataagttttcctgtcttggcagaaagaccctgttcttaaaaaaaaatggcacatcctccaaaaatcccatgttgatttaatttggcatattctcacaaagggaaggtcacggaacaagttccatttccattttaatggtttaatttcattatactaagcagacaactggaaacagaaggaaaccattaacaatattgtgatgtcacacaggacagatatttcaaaatggttttgctttatagaagtatgcatagtgtgaaaagattacaccactgtgatataggggaaagggcacaggcctttcaaatccctgccctgccgtctcttaactctgggaccgtgagtgggctgtgtggcatctatgaactttggttttctcttctgcataaaagagaataatgatacctactagagaattgttgcggtgatttactgagactgaaatgcgcctaatggaatgcggccacgtggtaggtagcaataaataccattcttttctcacttcttttgctgcccatgaaaagctaattctgaggaatctttaatcctttttactatctttttacaaacctactgtatgttaagagtcttatagtgtaattaaggggcccctcagtatttcttgaagtatattttatagggctctgaatatgagatggtaatacgtattttatataaagaacaaagggaaaatcgtccccaagctaaaacgctttaggagaatacagagggcaatatcagatttctttactgcagaacttctcagggtctttaatatgctcataccatggtatatttctaggaatacagtttagttttcagaatttccctaccttatttgatctgtgaaagtctttcttcaatatatatcacatgggatcagattgctgaggaagagctaatggacgaaaaacaacgtagtttaaatagtgagtaaagtgttagtattatttaaatcttagagttgatgaagtgaatctgacttgacatatctgtgctttttctttctccctccccccaccgccaccaacagagtcttgctgtgtcgtccaggctggagtgcagtggtatgatcttggctcactgcaacctctgcctccagggttcaagtgattctgctgcctcagtctcctgagtagctgggactacaggtgtgcgccacaacacccaggtaatttttgtatttttattacagaaagggttcaccatgttggccaggctggtctcgaactcccgacctgaggtgatccgcccgcctcagcctcccaaagtgctgggattacaggtgtgagccattgtgtctgccttatctgcgcttctttataataatgatagttttcccttgctaacccatttgggaagttaacatttgtgaaataaaaagatggggcttggccataggtcatgtgcactgaagaagcccatggggattggaagttgacttggctctctggcactaaatagccagctatcctcctcagttcttctgaatacctcctgaacagaaatttcttctttcagtgttttatataatagctaatcaggacacttcatattaacgttaaattctagtgctgccaggtatgaaaccaatcttgtctcactttcccgtagctaggactctcagcattgagtcacactattaactttcttttgtgattgtaatcctatgtggcataccagcaactcaaaatactttgggacttgaagtacattatctcctctcagattcacagcactgacccagtccagcctataccaaaatgtgattgtgacaaagcaaaggaaatgacagtattttagtgggaatccttttcagagaaaaagaagtcttgatggagtgagaactctttagctgaacctgaaaggtagatgatcatatcactaggtttggcataattatatctcagctgacattgctaaatgcacagtaaaagtaataccataggaggtgattcaaaaatcactaatctcagagtgcaaaacaatggtgctaaagctgccactttcaataaacacctttctccatggtgtattacaaaatggaatttgtctgtttccccatcccagtaagcctcttctgttttgacctacttctatgcgaagggactatagttagaatcattccttttacctcacttgttttttatttttaattggaaactttagtgttagggagaaactgatcataagacgagttaccaatacctttgtgaatgcctttagtttttttcatagccagttgtgctagtacttttgcctggcagtttcattttttctggattaagtaactgactatcaaattctaggtcaagttcaacttcttctagcttttttttttttttaaccttggcttattgtattatttccctgaccctctctctccttcccctccttattatttattttaatggcaggtatttatttttatgggcagcatttgttgttcctgggaagcatgtgtgtaatttgtggttttgtacataaattcacaaaggtctttgctaactgcttgggcatgctctttcgcacagatttttcatcattttcaccctgggagcatccagtctccctatgagcatttttttttctcccacaattttatgttgtattttttcttcctgtttctggtcttcctctttggatttctggcctttctccttgctttgccctccttggtttctttccatgatccttttccctgagttagaggaattggagaaaacattaagtagccaaaagggtttcatatttccaagcaacggattttatggctcgatagccaaaggctagagcaggacttccatcggctcatgattgacgcagctcttttcattaaaccagcttcctcctcgtgctaaatctctctggtaacatttgccagtactcagctttgtaagatggaaagctcctaggaaggcctgactctccaagtctttgggacatttcagccctcgatgagcttttttacttacctgacttgtgtttttccactttgttccatctctaccccacctacctaggtgtttgtccgtttccatatggcagttgccaggtgtttgtttatatatcacacagccttaaagtttgagaagtatgcctgtactacacatgcttaaagctattttgattgcccttatgaaatgcaggtaaactatgctagagagtatttctatattctttactaattaatatctgatagagttgctctaatatagtagctactagtatgtggcttttgttgttgttgttgttgttttgagatggagtctcactctgtcacccaggctggagtgcagtggtacgagctcagctctctgcaacctttgcctcctgggttcaagcaattctcctgcctcagcctcctgagtagctgggattacaggcacataccaacatgcccggctaatttttgtatttttagtagagacggggtttcgccatgttggccaggctggtctctaactcctgactcaggtgatccaccttccttggcctcccaaagtgctgacattacaggcgtgagccaccacacctggccacatgtggctatttaaatttaactttgagtttaattaactcaatgatatttaaaactcgtctttcagctacattagccccgtttcaaatgctcagtaaatatatgtggttagtggccaccatattggacagaacagatctggaacagttctattatcacaggaagttctattagagtgtgctacttcagactgagtcatggtttctatgggttgtactagggtagttaacagtaatgaaacccactgtcttctgcttatatcaagtatgctgttaatagcattgagttttaaaatgcttcagcttctaacttggtgaacgatttgttggtgatatcctaatttttagaggaggtagaggtgttcttgttgcccttctgaaaaactgtgcatttctcattttattgtccattgtagaatatgtgtataaatgtgcacagcttttatcttctatcttacctctcctttctgaagtatgcattgtaactttgctcgtattgccatttagacttcccaaagagtcattatgttgagtaaaaataatttagtcttttctttttgtttggcttaacttttcttccctcctaccctatatcttttgtcttccaagatattataactaggaagagttagcatatataattatgctattatctcagaccctgagataccctgtaggacagattcacaacagagtcatcatttccaggctaatagcagggggttcaccctattcagcattccacattttcctctgtaggcactcacattagttttatattttaggtagcaatatgtgtagtttagctttgtgcaaacatattaggagtagacattcagtgtactgtgtcctggttatctagattctaaagcttcattttataaaaatccagctctgtggggaaagaggggtgttttattaacatgcggcattaacactgctgggctctgtggataggttgacatagtgtcatcgtcacagaagataaaattcgaaggagcatttgtggagagcatgcagtggatattagaacaatatctcaggattttatggtggtttaatcattatccacccctatcctttcgttcacacagtcaacctatattttttaaaattcactacgtgccaggcactgtgttaactgctgtagtgactcaaatgtatgattgcatttatatgagatatccagaataagtaaatccatagagacagaaagcacgttggtcatttctaggggctggggaaaaagaaaataagaaataactgctgagtgggcatggcgttttattttaggatgatgaaaatgctttggaactagatagacataattgtgcaatattatgaattgatattaataaatgccactgagtggtttattttaaatggttaattttatattatgtgaaatttatctgagcttgaaaaaaaaaagcatggaccttgaaagcaaatagatttataatcaggttccaacttgacttctcattagccatgtgattttggccaaattatattttctctctgaacttctgttttgtaacactagtataaaaataatagactttttttccagttagaaaggccaacagtgttaattagttttcagggaaatataagatgcatataaacataaacaaaatataaaacaaaacaatcaaaatcttacagtccaggagcatatcaagacagagcattttttgcagacacaagagtactatcaaagggaaaaatgatacctggaaagtaaaaggccaaggggcttgggtgggtcccttacccaaggacactgcatttttgtggtgtagccataagatttttttttctttttaaaaagcacttcagtcttaaaaatattagaaacaggccaggcacggtggctcacgcctgtaatcccagcacttcgggaggctgaggcgggcggatcaggaggtcaagagatggagaccatcctggccaacatggtgaaactgtctctactaaaaatacaaaaattagctgggcgtggtggcagatgcctgcaatcccagctactcgggaggctgaagccggagaatcacttgaacccaggaggcggaggttgcagtgaaccaagatcgcgccactgcactccagcctagcgacagagtgagactcgatctcaaaaaaaaaaaaaacatatatatatatatatatatatatatatatatatattagaaacatggagatagtttagcaccaccattgatcctgaaaatattttagcacccacagtgactgcactgaatttaatgtccttttctcgattttctctgctgagggagaaagagggaaaacccagagaaagggctcctcctgaccccacagagtccactgagaactgagaccagttgagcagacagcgtgaggaattctccaaaattctgcagccccggaaacatccaccatttcatgcttcgttgatctccactcctgcctaggcctcaccttcccacagacctctcaggacctggcagggaaacccatttgtcatcctgtgtcctggatttaaggacaagctgttgcagagaaaaggttgtacatttaaggatggtggctgttcatactttttttctctgaaataaactcctaagagcagtatgccttggttataagccactaaaaaatggaaagctgcatccatggatgaacattcactttacccagtctaattcataccagggtggctgactcagaaaactgcactaccacaagtatcattagagatacttgagattcactggtgaatagaaggccaagtgaggttgccttcttcccaggtgtgcctgatggatggaatctggaccctaagataccagtctgggaatggtgggtccctgctgcataatccatcatgatctttcaacctgagaggctagctttggatgggacagtctgtttaaggttgtagctgattttagtgtggaaatggacagaaagtagttggtccaatgccgtgctcatagtaagtcttcagcaaatttcagctgctgtaatcatgatttataattgcttttcagataccatgatgaaataaaataatggtatatacatacagaatggagatagggggaatgtgttttattcgttacccatatcatacagtaagatgtaggtgaagcaagcagaatatgtggtagcaatctttatatcacttctactgaaatgttagatacagagaaaatgtgttgaatatatccagttttgtttctttaatggagtaaattggatcatttctattactagtagacagaagacctctttcctgcaacagcctggacagtcctgcttggaggagcctctgcccatctcacaccaaccttgtctcagtatccagccaccctggctgccttttagttcctcacatatactaagttttttccactacagggtctctgttcctgctgttctttccgttttcccaacattttttctgcccctatcccacgtctttctttctcttattctaacaaaacacacttcagtcctggtgcggtggctcacgcctttaatcccagcactttgggaggccaaggcaggcggatcacctgaggttgggagttcgagaccagcctgactaacatggagaaactccatgtctactaaaaaaaaaaaaaaaatacaaaattagccaggcgtggtggtgcatgcctgtaatcccagctactcggggtgctgaggcaggagaatcactcaaacctgggagatggaggttgcagtgagctgagattgtgccattgcactgcagcctgggcaacaagaatgaaagtccatctcaaagcaaacaaacaaacaaacaaacaaaaaacccatacttcttctaggcctatttactacctggctctcaactcgtattttcactcccttaactagctctcctgacttcctgagctcagtttcattcctctgttacttgtatttgaagagccatgcgccttttgttgtattaagaaacttatgtgcttgtttgaataatacctgtctcccctactaatctggatattctgtaaaaactggggctgtttggatttttgttcatgattatgttctcagcattggttcactacctgatacgtgaaaggcatttaataaatgtttaatgatctgaggggtcaagagggatcactgaggccagtagtatgatacaaatctgggcaacatagtgagatcccatttataaaaaaaaatagctgggcagggtggcacatggttataatcctaactatttgggaggctgaggcaagaggattgcttgagcccagaagttcgaggctacagtgaactgtaatgatgcctctgcattccagcctgggctgtatacaggacaggatcctgtctccaaaaaaacgaatgaatgaatgactaaatgaatgcatgaatgtggaatgaaggaaggaaagttaatttaaaatttaaaaaattccaagaatagaaggctgtgaatttaaaagccaccaaatactacatcgtgaaaaaagaaaagtggcaattttactctgaaattttacattttctttggaaaatgagatggaaaccattcagaaattcagcaattcagcatccagttggcacccacaattagtcatcttctttgaagtgtctgtttttagagaggtttgctttgataggagtcactaaatggcaggctgatgggagtaccacatcatatggccaaagagaacatcacccaaaggctccaagtacacataaaccttcctctcaatatgtagttgtctgaatgtttctgtagaagggaagagtccttttatttgctgcaaattgtagctttggaaccaatagtaaaaagtaatttccaggagtaactatttgttttacattagctgaaggaaagaaggtatttaaaaaaaaatagcatccctcagaaatattgccctaaattaaaatttcaaaaagaaaagcaagataaagttaaattaaaagatagaaatattttgactttcttgtggtaataggaaatggagggtctttgaaaaatgtttaattttatcagttcccaaagtgtctgttggggatagaaagttgggccttttctttttcctaggcctccagttctccccaataagttggctccttgtttttgcttgtccaattaaccttttctgaaaaccaggaatttgagattgcatgccttgttcttaggagagttgctcaatattttgacactggtcttcctgtttgtgggagaaaaaatagataattaaataggtttatctattaaattatatagattacctgttcataaataactgccaaaaactaaatactatttggaagtaataatttttctggggtcagatagatatgggagaatgttatttttttccccagtgtttgatcttgctaggatttagacagaaaggagaaacctgctttgattttctttcatttttaaaagatatgaatatggaagataattcatgagttaacaaataatcattaaaaaaattattgaacaataatttgaagtcttctcacatcatctcttgtcctaagtgctggggtcacactggtgagcaaaacatggtccatttggtaaggtggatgtacttagaatgatttcttcacatttatactcatgtgggatggattatcagttgcaagtgataagaatgcatgtcaaagtaacttcagccaacaggaggagttattggctcaaatagtggggataccaagcttcattcatggttggatttacagaatcatatattgttgggaatctctggctgtctttcacatccacttccttctgtgattcctttgttctctggaagatttcctttgtatggtgataaggacagttgcccagccacttgccaacctgattacctccatccatcttattaacctgctgtcaagaaagccactctcttccagtggtttcaacaaaagtccttggaccaactcgcacaggaaagatgaagtcagggaatggattattcagtttagttatatgcctgtacccagaaggcgccttctccaatcatgtgaactgtgagtaggtgaaaaatgattctcccaaaggaaaatcaggaggaatgctggatcatcgaaaacagcagaggtccattccatgtgctacattgtcatttcaggcatgtgtagtacttcctctttttcttgccaattgaagcaggtttacagattagtgctgtagggtagctttgcttccatttttattctacctcctccctcccgggaactgtttcatccccactttgttgcattcttaagttgaagtttgggtggcctcggagatccaagttcttctaacagctggagatttctgcggaatgtcaccagggaacctggtttctcttctccaggggactttttgtctcctgaagatgtggaagaatcttccctgtcactgaccttttactgacttaggatattactttcccaaaatatactcaggattattctaacctttgaaaggggaacatgggttgtgatgtttctaagggccttaatagttttctgtttctctatggagttgcaaagattatttcactttgacttatataatttgtcagtttaaaacaacaattatcaccaaaagatggtttttaatgttttcattacgttgcctccctatgcaatgaaacaaagaacactgtatgtgacatttataaattagccaacatgcttttgctgttcttcctgccctatgcaatgatggatgtttatttctacctagtttgtggagcccggaataaccacactgttttcagggtattacagtacccctgaaagctgtgagatccttcagatattccttttgtttcattggaatttctcttcgtgtgtttctatttagagctgtgaagtggcaggaacgggggcaggaaacaaacgtggattgacgtattggcacgttctttcattattttggcacacacaattttgagcagtctttctagctgatagcatgtgctgacccaaacttactttcttatttggttgaagagaatcctttgacaatctaggtcatccacgtacttttaccccatattcaaagaatcctccaactgtatttcaagtgctctggaaggggcctgaagccaagcagtgaatatagcagcacacatcccgatatgtcaagttagtgtttcaggtttgatatctgctggggtttgcagctctttcacccaagaactttaaaaggattcaccagagcagaggagagaaaggaagaatcttcagatgcttgactgctgtggcagaaagagtatcaatcgttacaaaaataatcttcaaccttttagcttcactgtgtggtgccattgacaagttacaggagatataccatcgcctgacatgaaaaagctgacttgatgaaacgcaggataatgtcccctgtcttacctttcaaaaacacggttcttcctttttcactttatcttctttgaaagtgaagtcaataatctcaacccatatgaattactgggttttattttctcctcccttgatgcccccaccctgtgctggcagagcctctggcaggcagagtggacacctgcttctccaagatcatttggagaggggattcttctttgagtcctggagagatatgcccaagagtggtccttcaccttggagctggcaagctcagatcattagcttgatggttggtattggcagagatccattaacaggaaccttgcataatcagagggctcatggacgctgttaatagacaatgtacttgaaaatgaagggtaaaatctgctccatgtgttagattaattacatcggcctaacaatcatagagaagcagtagaagatatctctctggagggatgaagtctgtcggtctcttgtttcattcattcatccaacaggcaattctttcaagtgtttattgccaggcctccgtctgtgtactgactaggagtttttggagtttctgcaactatgaacatcaaaatcagaaataaattcatagttaactatagcaacttgatcaactcaggacaagttgataacaaatttgtttattatttacttacttattgagacagggtctcactctcttacccaggctggagtgcactggtgtgatcacggctcactgagttctcaacctctcaggctcagcccatcttccccctccaaaaagctgggactacaggcgcataccactacacctggctaattttgctttttttctgtagaggtgaggtctcactgtgatgcccaggctggtttcaaattcctgagctcaactgatctgccttagcctcccaaagtgctgggattacaggcatgagccactacgccctgccacaaattttaattttttacaaatgttattatctaaagctagattctgagcaattctccactttcatggcaggataggcaacaggacaaaaatgaattttctgtgaaattaatgaagactgtgcagttcattcacagatatcagaacatagttgccctctaatcattcactaagcatcttccttcacaattattgcaatgcccagttatcctctaagtcctgtgtttgtaattcagttggtttatactagttgcatttctatcatgctacttactgagtttcctctattggtaattaagagtctaaactgcaaaatgcaaatatgtgtgtgtgtgtacacatatgcatgtgtatatatggatatatttacatacatgcacaaactttgattagataattcctactagaataagaggtgtgtttcaagtagtatgcaatgtattattttagtcaacaaatagttatcaagcatcatacttctattgttccagaagtgggatatctatgaggcttaaagtgatggtgacattcacaaaacacttgactgtgtatggcactttatttccacaagtaccaaaaataacacaaaacagattataggataagaggttaatgaggcagaactcttagaaaggggggaaagacagtctttgagcagaaatctgatgaaagtgaagactccttcatgtgaataactgggtagtgtcgaggggtgggagagttcccatgcaaagcatggtgtgtgtttggcatatttagggagcagaaagtagtctcacaggtgcatgactagagcaactggactgtcagccacatggataaggtcaagctgccctatcttgggaggcaagtacaaatagtttctgaaggcccttgctgcttgctcttcctattctctccttctcaccctagatataatatttggtattaaggtggcagggcactcccttaagctcaccaaagaaaatggaaatctagttagggaaagagaaaacaaaaatatgctttgcttttagaagagaaacccaggacatgaaagcaacacagttttatgtgtccatctgtctgtgacatttttaaacgtataatgtgaaggtcatagggtccaagttctggagatagattgctgggattcatctttgctgtctcactaatctttgtgtagccttaagcctgaattccttcatctttccactggagataataatagtaccttactttcagggtgaatctgagaattaagtgagatagtacatgggtactgcttagcacactgcttgacatgttctgagcacttaacacatattggatgtatgtttataataaggacaaatatttgtccctggaagtttgaaatagcagccaaagatgagtatgcattcagttcttgtagtgtttatataatgtcttcaatttgtacataggaatagttggcccataattctgaaccctttggatgcataactcctcttccaaaaccttcctcaaaaatacatttcctgttcctaacacccctggttaatgcttctcttctacttacctcatgctttgacaaccctattttttttcaagcccaaattatggaaaaacagtccttacagtagaaacaagccaatgttagccactttttaattgattctcatgatttgcttaaacataatattggaggtagaaaaaagagcacaatattacaggagcctttccttgatgaatgtgagaaaaattggccttttgtgtttataaagtgagtttttatggaacagtagataaaaagagcaaaggaggcatttttgtaagtataaaaaaatgccatagatgtccggtgaaaaaaacagaagttgctgtaaggtatcacgatcctatttatgtttcacacgtaaatatacacacacagccctgaaattgttcaccgaggacacctctcagtagtgggacctgtatttttcccgttatactcttctgtattgtttgcttctaccaatgtcctttttatgttggtatatatgagcatatatatttactccttgagagagtaaggggaaaaggaatttaaggagaggagaagaggcagagggtgtactttttccctttgcttatttgagcaaagataggtatctttataatctcatttgacattcttagtcttagtcttcattttgtatccctgacaggctaccatgtctattgcaaaatattgtggtcttccaggctattctaaataatgctcacccataacaagttggaaataacatcacttatgacaatgagctgtacggattccccattcttggaagtggcatgaatagtatctcccacatgcattagtgactcccatgtactctttgtttccattctttaattcctaaagttcaccactttccaaatgacagttgcgctgaaggcactggagatttaagcctacaaaacattcttctggtggaaataacagacatggaaacaacagggtgaatgcttgggcaggcattcattcattcactgaatattaattgagcatctactctgcgtgtggtggacctagagccagggagtagcatcagcagcttccctggcacggtgggttttctctgctaacactgagctcacagcctgctgttcctgtttgtcatcatcctcatcacttccttttggctcccatctgactcactggactcattcaggttatttgcctggcttgtgaaaatgtctgggtttcggatctgtgatctaaactgcctaggaaattaaattcaatctgaataaaacttgtttttgcgttgtgactctctgtggcatttcacacaagtcggttgtttctaactgggttatctgtcctggaaaattggagtttggtatgccaacaggacagagccatagggaagaatggagatttggactggtacgtaggtataattaggcaaggaaataacttggccaaggtaaaattctgctttaaatgtactctcttagctttagattgaactatcccaaactaggagtgagggtggagaaaacactggcaaagcactggcaagcccagtggtaggcagatcaagagcactgagcacacctgtaggccaaataattaacctgacagctttataggattgctctccttctctctcacctcttttattttttttttttgaccaattactttcaataatgatggcaagtcagcatctccccctgactgcgttagagattggaatgtcaaaagggcctctgtaatgtcttctgtgtcttaataaacttgtcagttgaggttacattattttctaatatccatcacggaaacgtgggatggtgcagctgggcaaagatgtcaggtcgtggtgtgtgtttttagatgggtgtgatttgacacatcccagcagtgccatggctgcatggcaatacttgaaagaacagcctcttcttttaattagggccctgctgccattttggtgggatgtcattctgacacctgtttgtgctgtgggggctgctgataacctctcaacacctttggcagaaagttctgctgatgtgttaggtgtttggttaatgtccatcctgccagggattcatttcccctgacctgaactctgctggcattattttttattcaaaaaagcttcagcagtcttccactagctacctacttaagtttatgatctcccaccaaaccttttttagggagaaattccaaaaaaaatgtttttgttggaatcctgctttgagccaggcatgcccctgaacactggacatttaagggtgagcagaagccagcactgtctctgcctttaagaaactcattttcacgtggaggagatggtcaaagaatgacagaagcacatcctgtgctctggagccagtgctctgaagataaggaaagtgattctaaagagcaatagatcagtgtttcccaactaggagtgattttgtcctctagggacttctggcaacgtctggaggcatttctggttgtcagaactgaggggtaggtgctaccagcatctagtgaatgctgctaaactttccatgatgctcggtgcagaccccacagcaaagaatcacccggccccaaatgtgaacagtgttgagggtgagaaactctgctgtaaaccatagaaatctggcctggccagggatgctggagaggcttcctccagggaggtctgaagggtgagcaggagtcagcaaggtggcagagatgggtagggaacagttttcttgacaggggaaccacatgtacaaaggaaagcacagggggccttggaggaacagaaggaggcttctgtggcagttaacaggaagaaagggggctgatgtgtacgtggaggggtggtggttgtggactacccagggccttatatgtcccagggggtcatgcaggcttttcacattaggtgagatgtaaggggagttcaagaacacgcgtgtgggtaaaggtagtacctacctacctttggaggtgacatagtagcatgtattgtaacagaaaagagcactcattttggaggcagatacaactgggcttgaatctgtgctctgtttcttaggacctgggtgagtttggacaccttacttgacctgtgcagttctcagtttccaggttaggaacatcttacggggccatagggcagtgaaagagataatgtgtgcacaatgtcttttgcagaacttcccctcatgtcttcagtccagcctaggctaaagtcgtcttatccaaaaccaagagctctgtgtgagaaactaggacctttgttagaattttttaaagttctgggtcttgcctcaaacaggggtgctctgtaccctggaagaacttgctagttttgttgtaagcctgagaccaattctcataggaaagattctatcaggtcttgtggttgaaatgtttaccttagtcaaaaattccaattataatccaggtctctcaatatccagggaagccataggggaatgatgtacttgtgaacagtgtttttagaagtttataggtaggagtatagcgtagtgactaaaaaatgttggctctgaaatcagtcatgggttccaattttaacttctcctcatattaattgtgattgctagcgagtttctcatctataaagaaggtaaaaatgaaatgcatttcataaagttagcattagaataagatgaagtctatatacaggcacacagtagggcatctgataatacagaatatttaacaaatagcactatcagaagaaaaccagatgccccactactatgatcccatggtcaacctgttttctaaatatttagggaaactgaggctggactgcacgatctcattggttacataaatgagtcaataaagtaatccagaaataaacaagcacttgagaatttgtaaccgacccttacttctggcatttggcctatattctacctcttctgtaataaaggacttaaataggcaggtgactatagaaaatgtacaggtttattgcaagagtaaaattaaaagatctacattggaagttattataaaatgacacaacaaaattttaaaaaatattgaaaatggtctctcctttattggaaacctaaaacgtaatgccctcaaggaagctttcctatgtatagtaatagcactagaatggcctttcaggtcattctgccccttcctctgtctcctcacagagctggacttttgaaatttctagggctttccatacttttctaacatttccccatacatttctcctggtgatctgtcctgtactgtggctttgctgttgaaaattctttccaacgtccggtttaccttcttcttgctgttagcatcagtgtcgcctttaatccaatctcagcagagaagagtgatctacttgtgcccattgaaggggtgactttatccacctgtgataatgcagtgagctcctggaggaagcaggcaccatcgagcctgatgcacattgattttcccaggtgcccctctttgtgtgtctccatatgctgattgtgactttcagccctgttttcctttcatgtagtagacatagaggcacacacctgcttgtttatttctgctgcttctgttggttctgggtttttttttcccccaaatgcaggtccctcctgagttacctacctcgaaacactctccatgtgcagcataccttctgttcctggcaagcgtcctatcccctaagcacactcctttgtttttcttccaggaggaatcatgcccttgaaagtgtcttctttcttgatgactaagtcacaccaactctagcagagcaggactgagctcaggccttaagggtagacttggcatttgtgaattacactattaataattgtgcacatgaaatacccggagattcctaagcactggcacaaatcaggccctaccctcatcacagttgtggaaattaaacatttattcaggattggccatgactatggcaggcaggcagacgttgtgccgttttgcttttacaagcttcgtgatgcccatgggaagggtttggttgtttcaactgccacaggcttttcagccatagggacaacgcagttggcaatgctaccgatttgccaccttttaatagcctgataattaaacatgatgggcagataaaaatagagagaccaaacatagccacacaagtcagttcttctgttattgtcatactcgttaggaggtatatggctgaaggacagaagccaagtcagattttaagtggccagaaactccgtcatatctttttgctattacaagaattttacaaaagaaatacactgtttcttgtgtaagaatatggattgcataatcgtcttttttttttgctttgtctgggataaagttaaaaatttcttaatgaaaattatcaggatcatattgtctgttgttcctacttcaggagaaatttgaatttgtattttaattaacctctctctctctctctctctctgtcacactcacacacatgctctcattctcactctcattcagctctgttttacaagtaacaatgtgttattggtttggaattgatttgggtgtcatatgttgtcatttgataaaaaacagtttagctaagctgcttgacattacaacagctggtaatgtcacttttgttaatgtctttaaccacatttttaacaaaacagcagatgctcaccacaaaaagccattttctttctctactcgattgtgtaaaatcagctcaactaagggctccagcttgagaagtcctgtgagtggatggcttgacctcagaagaagataggttttgaggttcttgattccttggcaacattagaacaacaacaaaaaagatagttgtaaaaacaatgcaaaataggtttcttctgtaggaagaatgctctaaaaatatggaaaatgtggtggctcatgaggaagccaggaagtcctggccttatgaccatgaagcagcaagttcaaatgagcagtcatggccatggtgtgggagaactgcgttccatctagcggttggaggatgtcatcatcacttcggaatctctaatttttaggggaaaacatactaccttttcctcttccctctcttcctccctttcttaaccaaggcattttccaccttgtaaacatacacacacagacacacagacacacagacacacacacacacacacataagcacagaatgggattagttttctgaaacatttgagtcatgcagcacagactttaaaaatttgccccgaaagatttccgtcaatatgtttctctgtatagcagacatcttagttttaagtcttatcctatgtccgtaatttttactgccttgtttgtatttggaacaaggcagtgtagtatcatgcaaattatgactctcgtttgctcatttgtgcacgcattgagcggagtgtttctggagccgctgttgagtgtgaggcaatgtgtcctcatggttatgagcatgttccctggagttagagggcagttatttggtgtctccaccatttattaacctagtgacttggggcatgacacttggctcatttgtccttcagtttcctcagctttgaactggggataattctagcatctaccatgtagattttttggatggataaaattatttaatctgtgtaaaattaatagatgtataaaagcaatgcctggtgtgtggaaagtgctaaaaagcattgagtgttactattactgtactaaaaaggtagattgctaagaaggtgtgtgctttttaacgtattgtggtagactcttcaacttcctttctacccccttataatttaatttaaaccatacgaaaattggcttgtgaggatatgtatgggggagagaatcttaccctttctatataaaaaacacacatcggctgggcattatggcccacacctataattccagcactttgggagaccaaggtgggtggatcctttgagcctaggagtttgagaccagcctgggtaacatggcaaaaccctgtctctgctaaaaatacaaaaattagctgggtgtggtggcaggcaccggtagtctcagctagttggagggctgaggcaggaggatcatctgagcccaggaggttgaggctgcagagagccatgatcgggttactgcactcccgcctgggcaacaaagtgagaccctctttcaaaccccctcccctcaaacatatacagtatatctgtggaattaaatggtggggggtgattagaaaaaaaagtctaaagaggctccttggggggtaataatgaaaaaggttagcaaacattagtataaaatcagaattaatgccctctagctagagacctccaggaacacacttggaggtgaagttgggttctttgctcattgcagtgagggagaacacataccacagagaaccatagcatatctcagtaagagggtgttagaacgaatttggagttcagttgggtgatttgggggagagtctaaggaagggagggagattcattctgcatagggtgctgtcacaaagtggggataattttatgattggatatctcacatctctaaagggaagacagtctaaagtgaggctaaacctgtttttcataatgaagtagcagtcactcttagtagctaatggacggggatgtttggtatctcaggagttgtgcagtgaccttttctttgtctgcgcttagagaaagtatgaggccgggcgcggtggcttacgcctgtaatcccagcactttgcaaggcagaggcgggcggatcatctgaggtcaggagtttgagaccagcctggccaacatggtgaaaccccatctctactaaaaatacaaaaattagctaggcctggtggcaggtgcctgtaatcctagttactcaggaggctgaggcaggagaattgtttgaaccctggaagcggaggttgcagtgcacagagattgcgccattgcactccagactgggcagagattctgtctcaaaaaaaaaaaagagagagaaattatgaaatagtcttgttttgtcttactttatcatggtctcagagtgggttttcttgagctgtttatgttctgtgacattgtttatgcccagcaggataataatgtggcctggctatgagtgccaggttagtttctaacagtgaggcccagctatatgtgttgagcagtttccagatgtcaagggtttgcttttttcttctttcgttccttatcagaatacttccatctgtcttgccaaagattcaaagatgagctggtaggaaccaatttggaccacatagtggtaaggagaactttgctcatgcttctaaggaagaacaactagtctctttcaggaaccgaacaaggaagcaaagagcaccaattgctacatgcagccatctcatcaccattcagggaactagcctgaagacaaagtcttcacaaggtcactaaagcaaaaagctcagaagatctggggtcacccataacattgtgaggtcactgaatctgcccgatctctacacttcctattttgtgaaatagtttccagttcctgtggctgcaaacatcctgagactcctttgcaacataattccaggaataatttttgaaaatatatgggagaagatgatggacttattcactgtgcactttcctcccaagtcctcttacagggtaatttgctttttaggtatcattctccaggctaaacagctcagtgaaagtttgcttcttctactctgccttttcctcagagctttcacctcgaagctcactgctgcctgtatttagctagtcccacaccagactgcttgggatgctaatacaagagctattattattattttttttcagaatatcatagaatattcaaactagaagggacataagaggtcatctaatcaaaactctcattttaaagatgagtagacagccagccagagaattgtgacttcacaaaggtgaagcacctactggtagaacaactggacttttccacgttgcggtagatttaaaaaaagctcttgatgtgcctgctaccatttctgagtcccacatccttggccgacataaccgatcattcactgtggtctttcgtaccatgctttcaggcccttttgcatttttcaatccattactctagcaactcttagcagccagtgattgttggcagaggcactgaaaccattattacatcatgtgcacttaataaatcaataaatgtttataaataaaaaatatttataaatcagattataaatgagtattgatttattaatcaaaaatgtataaatccatatttattttccagtaagggatagttatttaaataaagatatatcttaatcataagagtcgtatctaacacttctattttatatatatttaatatataactacatatggaagaagtatcattttgctagcatactaatgcacattgattaagacccagcattacttttgttgccaagaggacagagtcacaattcatacattagatcaaaacgttgaagaggaatagattggcattattgaaataaaatcctcaaacattttgctttatacttatttatttttgagacagggtctcactccattgcccaggtgaaagtcagtggtgcaatcatggctcactgcagcctcaacttcttaggctcaagtaatcctctcacctcagcctcctgagtagatgggactacaggtgctcaccattatggccggctaatttaaaaaaaaatttttatagagacaagatctcactatgttgcctaggttgttcttgaactcctgggctctagtgattcttcccccttggcctcccaaagtgctgggattccaggtgtgaaccgctgcacccagtcattttgttttgttttaaattttttaggattgtatctccgatgcaaagctactataacatctgagttttaaaacaattagacagcttaattttaaatatctaatttttttttttttttgagacagagtctcactctgtcacccaggctggagtgcagtggcacaatctcggctcactgcaacctctgcctcccgggttcaagcaactctcctgcctcagcctcctgagtagctgggattacaggagcatcaccacgccctgctaatttttgtatttttagtagagaaggggtttcaccatgttggtcgggctggtctccaactcctgacgtcatgatcctccagcctgggcctcccaaagtgctgggattacaggcatgagcccccacacccggccctaaatgatcttttttatagtgttattttttaagctaggaaacagttccaatcttgcaatggttactaagcaacaattaaaatgaaatctcaatagatttttaaaactatatttactttagaaggagaagtgtgtggcttttgcacactttatgtctcttggcaataagtaacactggggactgagagagagggagtctaaaggagctggactttacttgggtgacggttgaggtggaggttggagtggggtggatggcccttgacatgtgtttgttacttttcacttctgcgattctccacaaatcacaaacagcaaacaaagctaacgcatggagtcaacgtggtattctttattagcagtaaatgaatgtcagaaaaaaaacgcaggagactgctggattcaggagcccattcctggatcaatcactgtgctgagtattggggtatttgatggcccagccttgcttctgaccctctctctggctgcttgagggaagagttgcaattgaccacccaaccaggcccacatggatatgagagatgggcagttctgcaaaggcaaaacagtgttattgtcagaattggggaaggacactgggcaggtagtagtaatggactgttccaggcagcttcgcttcaagtcaaactttgctgcgtggggtagttggggagaaaatgaggggtgggaatagtgtcctgtttttgctgtgtttggttcaggatctgttgctggcttgaacctgctggtggagcaattcagggttcaaagaatggaaagtacacagacaagagaaagaaaaagcactgacagccgtgtgactgagattttctgtttcacactttatgctcttaatggagaatggcaccagctctgtgactttttttttttttttttgactctgtcacccaggctgtagtgcagtggcatgatcatggcttatgcagcctcgacctcctgggctcagatggtcctcccacctcagtctcccgagtagctgagagtacaggtgcatgcctggctaatttttttttgtaaaactgggatctcactatgttgcccagattggtctcaaactcttaggctcaagtgatcctctcaccttggcctcccaagatgctcggattacaggtgtatgtgagccatcgtgcctggtccttattcttgaacaacctaacttggtgctgggattctttgcaactattagagataatttagtatgatatttctgcttttctttctgctattgaatagtttaaatataaattgactgtttgcaagaaacaaatgcttcatataggcataagtaaactgtcacagagattatgtagtagaagaaaatgattaattgtgccttttaatcatagttccattatcatatgaaaccgtcatgtcattggacccatttcactaatgaaggtttagcaccacgaagagcatatttgcattaatgaggcatcacaggttattaattgaaatctaataacagcttggaatattataagtttgcattaattggaaacagaattgtggatttgttggcaatatacctcttgtcatcttagataaatgattccttgatgggatataaagaggccatttttgccctgattggagtttctagcttctatatgttgattgtaatttaaactggaatgacctttcatgactgatttctaaagcagaatttttcggtatgcctgatgccatccctaccatggcctgtttggtttttgacctgttcatcagccacctactaaggaaaataatatggattgaagcatgtgtaggtcaaggaaggaatgcttattgactcatatatgccggaggttgtaattttttgaatttttgcatgagtgaaaaatcagaccttggcgatgactttgagcagtaggatatggataactcccacatgcttggcattccagtaatggaacactaggcataagtgggttaatggcagttctgttactaacttactttccagggaggccttgcttggccaccctaaacaaagaaggtgccttcgttattctccattagtgcccctgtttgtttcctttagagtattacacttatagtcaatcataactttgtttgtttacttgtttttagtgtgtctctcttactagtatgtcatctctaaagaacaaaaacagtgtctatcttgttcttcattgtatgcccagcacctagcacaatgtgaatgtgtagtgaatagctgttgaatggatgattgaatcctggccagggctggaagggcctggggaagggggtttccaccaaaagcaaccatagttatttcagtagagtttaacccctagatctagagcagaatgataaaatgccagacctaaaatttgccctaaaatcagcctgtgtccttggtgtttttatttcataaacgtggccttaggctacttttggacctaattctatctggattggtgtccctaagactgggaagaacaaagaaaagcagtgcctgggtattgtgccccatggcaattgactgagagctgtgttttctagcattaattaatgaagaattttgtagaaaccaatattcatgataaacttcaaaatagaattttagtgtaatgactggcactttggtcaaagctaacagaaaccaaacaggtgggctcagctgagtgtagcacctctttctcccccacctcctcttttttttttttttttttctggtgaattgtgagtgaaagttacctttctttcactcggtttatcttaaggaactatgccatcgtagaaagaactttgaagaggccatgagaaaacacaggttctagtctgggttttactacttaataactggagacactgagggaaagtccattttctggatctgcatctggaaaacagagtcatcttatccatagtacagaatttttatgaagatcattgaggaaaataaaggtgcttggtaaattgtaacgcaaattcaagatgctgctgttagtcgtgtgttggctgaggaggaaaataaacagaggcagtgagaaagaacttcacagagactgcttgagttgactcttggttaagcagcagcccttatttcttcatcacactgcatgtccaggatttcacttggccttcctttagagctttttcttttgtagctacaaaatgagcatgaatggatcctgaggttgtaccgtaagcaacttagagacctccaaattaaagcagggagacatcatgttttaaactacaggtttggaaatgatttttaaaaagttataataacttatatgggcaggggtgcaaatgaataggcgttcttacaccctgctggtggggtacggaaagcccagatggtataggttatagagaaggggatgtgtaacatgccattttggcaaggagtcctggcagatttttaagagaactgtctttgtgtacttttcaaaacatgttttcctttgttattttggggttcagagcatttctttgaaacttcttgaatctccccttgactggcagcctgttagttgatcctccatttgtgtattgtgtgaaaactccctgtggcagaaatatacacacacatgtcttaggtattcataccctgatctcttgaccttctggaagtagctgcggcctgctttccctcctggagaaacaaacaactcaatttgtttctgctctctggttagtgcatcacattagtaatatctacaataattttttcaggtaaaaatgtagtcaagttgttgaagacatgagagatcagagtagtttatgtgtgtacatacatgtgtgcatgtgcttcctacgagctaatagatacttactcctattacacagcctcaaggtaagattaccttgcaggcaaacttttaaatatgtaaatatgcttgccattcattgattatcaggttttcaccaaagggaaccaagaacaggtgcccctttagccacattattagaccttgtaggatctgaacgttggtctgtgttgcatcatgttgttggaagattcatttattgattgattcatttattcaccagaaatttatagagcaatttataggtgccaggctctatgcttgatgctatgattcagcagcaaataaacaaaagtacttgtgcccatagggattatatttcagtggataagatggataatcagcatgtcaacagggaaattatatagttgcaggtgctaggaggaaaataaggggatagtgagtattaggaaaggggccttatttttgttaggaggtctaggaaaaactttttgaagatatgagattggtgcagtaaactgaatggattcaaaagggagaccttggaagtattaagaggaaaacaattgcaggcagaggtaggaaggtttaaagcccccgaggagagaaagatcttggaatgttgaaggaacagcaagaaagacagtggggctgaagctttgtgagagagagggagagtggtaggaattgggattagatggatagggatggggcaaatcaaatcgagaagaccttgtaagtcacggtacagattttgcaatgggaggacgttagaggtgttaagtagtgctgtgatctcatctgtttatttattttttaaaagaatttactggttctttgaagaatacattgcatgggactaagtttggactgattaggaggctttggaagtaactcagaaaacaggtgatggtggtttcaacttgatgataatggtgtgaatggtaagaagtgatcagagtcttgatatgttttgaagatattggaccatattatattcaggaatgtaaactgatatgataaagtcatatcacatgattatataatttatgtactgactttagaacctatttttttgggtaagataggttcatactattcttaaatctgactaaatgggtaggaaattgacagaatttcaaagctgtaataattctcatgtccagtcttttacatcagagttccttggatgatgcatgattctctcactaaaaccgtgaaaagatgccagtgcaaatccatccaactttataactcacacaaacaatgtgatattgccatataagcatattatgacttgttgggggtctttaattccattgtgaagtaaatttcagttcatgctgatttttaaaaattaaatcctttttttttttttgaggcggagtctagctctgtcacccaggctgtagtgcagtggcacaatctcggctcactgcaacctctgcctcctgggttcaagcaattctcctacctcagcctcccaagtagctgggactacaggcatgcgccaccatgcttggctaagtttttatctttttaatagagaaggggtttcaccatgttggccaggctggtctcgaactcctgagctcaggcggtctgcccgcctcagcctcctaacgttctgggattgcaggtgtgagcgactgcacccagccattacattcttttcttaaaataattaaggtgcacacctatagtctcagcgactttcgagactgaggtgggagaatcacctgagactaaagaatgcaagtccagcctggaaaacatagtgagcctctgtttcaaataaaaataataatcataagtatcaaaaagtaaccaaagccagatggaattctgaagcataaatttctagtgtttgccttatggggtgagatcattgccatatccccactagggtaggggcaacagtgattgactccaatatattttatacccaaggagaaattacagtaccgtattcctaacatcccattaaatgcttaaaggcaggccgggcacagtggctcatgcctgtaatcccagcactttgggaggccaaggtgggtggaccacctgaggtcaggagctcgagaccagcctgaccaatatggagaaaccccatctctactaaaaatacaaaatgagccgggcgtggggggcgcatgcctgtaatcctagctactcaggaaggctgaggcaggagaatcacttgaaccccagaggcagaggttgcagtgagctgagattgcgccactgcactccagcctgggcaacaagagcaaaacttggtcaccaaaaaaaaaaaaaaaaaaaaaaaaggcttaaaggtttgccttttatccagcctaaccagtggtggcaggatggctgcagaagctccagcagaagacattatttctgctgtagacattacaactctttcattatagctcctgtagacatcctgagagtcaccctgattagaatggattaggtcatgtgtctatcccacagcaaatctctatgggtaggggggtaggggggtaggggcataggggagtaagatgtgcctcttagcttggcctgaggcacattcttcatgtctaaggatggaattctactgcgaccttatagactgagaggaggagatgattgaattcccaaatgatgtcagggttgttgctggaggaggaggaaaggggctatggggcaacagatgttcattgccctttgatggcaccgcagcaccttcaggctacctaccctctaaagcatcttccagataccatggagctccggaaccttaggtttaatggcagatatattttgatcaaaataccatatacttgttttctcatttgctttgtgcttacaaaggacaaagacaaaaccctagaatagaattttgcaagacaactccatagaagaattacccttttgttttcaatacagtccatcaacattgatcctgaaaaaaaaaaagcatgttgaagagtatatccaacactattctatttctgctggtggactgtgttcctcatacaaaattctctcttggagttctagttgatggtgcctatttccatagctttcctttctaaatcctatggcatagatgacagaaagtaaatagaagaaatgccaaagaaaacaaagaaacacctatatttaatttctgacaccagtggtttcatgtctttcacgttcaattaggtgagttgtttgaaggagctggtttcgagaagggttatagtgtccaaaggaaattattttccctggcatgtcaacaactatgatagaaatactaccagaccgtagggaacctcctcttgatggtggaaggaggcatgctcaaaggattactgttcaaggtcaaagagcagcagctaataagcacaacagggaagaaaggacagcagagtgaaaattagggtcacgtttacacttactttgttaaagctaaatttattttttaagtgagaagcactgcctttattaagacagttaatgcctaagaatgaatgaaaatatattgaaataatgtgtctttctcttctgagcaaaggatgtaaacccaggctttaaaagaatcccaaggtcttaattctgcaagagacattcttttatcttagttatctttccttattgggaacactggcagatatttggtctttaactacggtgtggtgtaacctatatcaattcagatgcccatgtctgatggcctcctttgtgtatgcagtctggtaaatctcccttaacacatctatccaactaatatttgtgattttaaataaaagatgttaccaagactatatatgatatttgtaaaatatccaaagttaaaattctaccagaaaggtaaagtatagtttgctaggataaaaataaatactatacagattctcccaaactgtacccacacttacatttcactaggtaatgctagaaaatggttattttccctattttcaaacaattgctgcatccctgacttgtgcaaagtactatcatccagtttgaaagactattaccacatatgccatttatctatccatatggcatgtatagtatgggactctagggtttattgatatgtgtaatgtataacactgaggaaataactgccatttagcatttctttttccttttcgcctctggaattgtaggtttacatttattttcttgtgaatgtggctatctcttcatgggcagtaaatattagtattttgggaccctcctcttagtcttaccaggcaacatttgtttgctttgtttcctccattaatctagcacatcccatggaaagaataatttactattaaacccctgtgaggaaaccccttcaccagtgaaaataacttagtgataattgatttcatcagagccttccaccttgattttccactgtcctaatagtggcctggcgaagcacttgagtcccatggtgaaagaaagaaatgcacaaataggcctagacttgtttccccgaggtcgttcgacaactgcaccgttgctccatgaggcacacattcagcaattagcaggcatatgtttccagctgactgcatctagcgataaagagaagctccgggaagatagcctaactcaactcctttattcttagggggaaaaaaatttgctcagggtttcttggctgtttccttgctctttacttactcttttgttattacataaatatcagtgtataaacaaataggattcaaagaaattctgtgaccaagcagtgaaagacctatgcagtataaagccacagagtctgctgcatccctacctgtcgcatgttgaactttcacctctgtattatgacacccacggtggcggaggtgggagcgcaaaggcactgcatcctttacatcttgctcctatagtgcctcacagtttgagggcaggatgtatcggtttccttcgaaacccagagctgctgcagtctctcctcttgaatcgtcagttaagacttgtagtttgaattaagagttcttattctaaaatttgaactctatctcatactcggtttgtaggtgagatggtttctgcaaagacagagagttcaaagcatccttttggctttcagtcctgaaagaggttttggaaagctttgtattgttggaggctttttcctcctggttggattcattaatacccttttgtgagtactattttgcttttttagaatagctttttctaaacagctttctctggtggaaaatccaatttagttgcaagcaatattaccagttccgctcctttatttttcttcctcagtgaaaggaaaataaaggattgcgtgtcaaaatggagatgtacgatttatggcattagcacttctattaataaatttatgcagcaattatatatcttcacattttatatctatttgtaactgaagacagcttctttatgttgcaagagcatatttttcttcaaaacacattttattttcttggatcttaagcttttgttccggatttccatggatagcggacgcatggtaggaagttttagctgctttacacacccagaaatggagtaaacttttgctgcagatttaatctcagacatgttgaaacttggatggtgttcatgatgttcatccgcacagtgcttctttcttaggagggctacacttaccccatttcaggcgagtcctgcctcatccaaatggtttgaacgtagctacccccattctctctagctcccaaactgggtgatcagaatacttcattcctctgtggtaatgtttagttttaagagggcagatccaaagccaacctatttagagccctctgagaacattcctctgcagtcatctttgagtaaatctgtttgagaatgaaatcagatgaagtaaagcaggaaaaagagaagagaggatggggtgtttatgatattgtttgatagctggatctagtatcatgctggggatggctcatcccagcatacaatagcctattgttaaatgttcaggaattctgtgagctggttgacagcgtgttggtagcttgaaattggctgcaagtcagccccctcctaccccctgcccttttttttttttaaatgagtatattgttaaatgtttaccagcctcactgcctagacctatcctaaataaagtcacaaggcttcttgtcatgtgagcaaattaacctctattccaccctcctctccttcagtttgactttggtttgccacatgcaattgtaagagatttggactggctaaattatttattttgccattatgataaacatcttccctttatggtgtagattagaaaatatgaggaaaccaatacagcttttgatgacaaagctgtatgtccctgttgcatgttaaaaaatatttgaaggaggtaatgtgacatttctagaacttttgatggtttataacaacctgacagattattcactgttcttggggagcccttaattggcaaagaaaacaataaaatctgttttgtgaagcagtggtgactgtcgaagatgaataatctttgagggaaaaaactaggtaacctgaagttttgagacagaattaatagtagagatggtcttgtttctctaacatagataaaggggaccaggataagtgtggtttaagaagctgctcattgtaagggtaatagtcagttgagtcaaactggtatgtcagctaggaccatctattttgttactttgcacatgtgaatcctatgtttgtttccgttgctgataaatgatgaatatttgagaacagaatgcctatgtcatagcactgcatgattctgtggagatttagtgcctttaaacagtcccacaggtctgtttttagtcatctgaactaaattggaggcaaaatgcattggaaatgctcatatccagcatacactgggtttgaatttaatttctaataatttgttgctggctattatgtgccccccacgccactgtagaaaatcagtagaataatgtacaagcccaagtggtgaagcttgtacataatttacatataatgtgactgcagaatctgttatctctttgaggtagcaacagaaagagaaaactacctaaaatttagacaaaaaaccttgtgtattcacaatgcaatttccaataacaccgaggtctgtgtattattttcagtagaaagtaattcaaaggacaaaaaaaaattgtaggtggacaatctaacagtgagaacatatgaataagatttcaaatgggttgagagttagttgaaggggaatactgagggatttaggtcaaagtctttggaataaacctagaccattgggataatctgaaacaatatcactggaattgatgtttttttcctccaaatcatttgggaggtgttcatagtgcatcacacgccctttatttacaaaaagtgctttctatttggcataatattttcacagaccagttgaagttacagaagcttcatatttaagaaaagaattaaaactacaatcaacagccagataggagaaatacattctggtattttattgcatggtagggtgactatgattaacagtaaaatattgtttattacaaaataactagaaaagaggctattgaaggttttcaccaaataagtgcatgaggtgatggatatactaactaccctgattggatcattacacaacacggatatgtattgaaacatcaaattgtaccccgtaaatattatgtacaattataatgtattcattaaaaaatacataaacattaaaaaaaatcttcagttaactgagaaaatgttcaagacttacctaaagcaaatactaatcaagtttacctgttctaattttgcctgagagcccctgtcaaacaaggtggtgcctttgtaactatagccaggtccctcagtctctccaagctccagaatacttgcctgtaaaagcaaaaggcaaagttggttggagaaatgaataaaaataactacctccttgggttattatgagtgttcaatgaattgaatgaaataattgatgcttagtgcttaacacagtgactagcaccatccatatcaatgggattcagctattactattgttattagagttgttagttggtctccccagccttgctcatgagtttcattatccatgtgtaaatgaataagtccccataacaacttctgccgtatggatgctggatagctttgctcatgtgagaagcaactcaaatcaacacaaatcctgtgggacatctgccctgatatcttttgaataaagcacacatttgaagagactgatttctcagtccagtgtgtcttcatacacatggcagctctcctgagggccacacatgggctactttcatgcctagtgttgttactttggaagccgttggtctctctttaaggtatgacctactgcttgcctccctaccccacctcccagttaattttgcttatgctgtatggcctgtatttggaggcctatgacctcaacctttatttaattttggtgactgtattccagagtactttcatttagtagggtgagtgacaaatttaatttatattaattgttgagggtctctgaaattacagtaacaaggttaataagtttagaaatcaaagttatgaagataggttatggtaagccatttagaaggcatactgtttgacttatagttggcaatagaaatactgctttaaaaagtgtcatcattttgttactgaatttgttttccattgctgcataacaaattatcccaaaactctgaagtttaaaacaataatcatttatttttgcttgtgtcttagtgaatcatctggggtttagcagatctaggctgggctcagtggatggctctgctccatactgctttgtgtttttcatctcccttagactagcaaccacaccaactatgtcacttacttctatggctgtagtggagatgcagcaaggcaagcagaaatgcttaagaccttttaaggcagagggtgagaactgagtgaagatgcactgtcacttctccccatatatcagggcctaaggaagtcctaggaccaagctttgactgaagaggtggggaaatacgtgtggccccagaggccatatacaggtgtggatacaaggagggctaagaaattgagtttggcaatgctatctaccgtggctatgatgtgcccctctgaagatttgctgcatggccttagttccttatgttctcggcctctaacaaaatcactgtactctctctttctgggcatttagtatattttaatctcacgaatattgaaaattgtgccgcagacccagttttctttcttgtgttggatgccagaaagctgaagacaaactagtagctgcttagagcagccatatctaagtgattcttatcctttgtcttgttcctgactctagttttgtctatgacatttgtttacttaacctattcttaaatattcttatcttgttaattcttaatctgttcttaagttgagttatatttttgtcttttgtatgcctcttaaattgtcttgcatgctgggcacagtggctgagcctgtgatcctagtgacttgagtggctgatctaggaggatcatttgaggccaggagtttgagaccagcctgggcaacatagtgaaatcccatctcttaaaaaaaaaaagaaaaaaaaaaagaaacgcaaaaatgttagccgggcatagtggtgtgcacctatagtcccagctacttgggtggctgaggcaggaggatcactctgtgaacccaggaatttgaggctatagtgagccatgatcgtgctgctgcactgcagcctggacaacagactgagaaaccctttgtaaaacaataacaacaacaaaaaattaaaaaataaatagcctggcatcttttctggttcaagaagaaatatataaataaaattttaagcaacaatttactaccactattagcccttgacccggtaagtaaggttacaaataatatagtagtagttagcatttattgaatacttctttcctcttgggccctgtgcaacatattttttgagcagtacccaattcagttcccacagcaaccttatgagctacgtgctggcattatccctgtggaaacagatgcagtttatgtaacttgttcagggtctcacagctggtaaatatcagagtcatgatttgagctgataaaggctggctttagatcttacattcttgaccagttagttatactgctttcctattgatatgctaaaagaaaaggataacaggaatggatggtaattcttttctcttttcttgtgtccttgatgcaccttttattccttgcttaccttcttttttatccccccatgtctgtcataaatatgcctaattaaaatgtcaactgctaatagcttaaaaataccattttaaactctgacacttggcgttccaatcactacagtttaaacagaaaactttaaggatttaggttaatgaatatggtttatgaatcactgttaccagtacagatatgtttagcgcaactgtccttgtatttatgatgaacataatccttccaggtacattttatgttttcttgctgaagtttgttggtaaacgtggaaattaaactggaaaatatggataaatcagcacaattccaaacacctgctcaaaacattcattttagtgatttaacagttgactctttaggatgtttttctaaaaacattggctctaggcagaataagtattctcagtgaatatatttgttgacatatcacttagaagctactacactgacagattttaggaattctatatgagtttgatgacaagcaaaggccattttagatgagagtgacttcctgttttactggctgattctcatgtatttgtatacttttagtgatgggactttctcgctttgatttttcaatatctcatttggctcagttatttgtaaagtcttcagtgttttttttttttttttaatgggcatcatgctgtctcaatatcattactgcacaactacaatcttaggaggaaactgtaagtaatcagttttctttcagaacaattgtaattcccacaaccctgaaaaactctgaagccattttagtaatgatcattttctgttaatcaattatctgtgcatttagacagggagagggcttattatgttttaattctcttaagaatgtccaggtgatagcctcatctcttccagttatcccccctcgaaatggctgcacagtagatgactgacagattgatgtcccccaaagctgagtttcattcttctgctatttagtcattgccatttcttcaactaatagtttatgtatggtaaacttaaaactttgaatttcttttggtgttaccagactgaaaccatcctagaccttctaagaaaaagaaaaagaaatttactgaccgatgacagctttgacaccctagatccgagtactcagtgttgttaagagtctgtgtctctcccggctgggcgcattggctcacgcctgtaatcccagcactttggaaggccgaggcaggtggatcatctgaggttgggagttcgaaaccagcctgatcaacatggagaaaccctgtatctactaaaaatacaaaattagctgggcgtggtggtgcatacctgtagtcccagctatttgggaggctgaggcaggagaattgcttgaacctgggaggtggaggttgcggtgagctgagatcacgccattgcactacagcctggacaacaatagcgaaactctgtctcaaaaaaaaaaaaaaaaaaaatagagtctgtgtctttccctccatgggctctgattcctccatgttgccttctttggacaccttgtctcatgtggtggtcattggccatacaatgttactatcttgccactagtagcaatctcagcataagagagcaactttttccccctcactgccaagttgctcatatcaagaatcccacggagaactttcattgatccagccatgtcatgtgccaaactgaaaccccagggctgaggtcatacccctcatgtgaatttcttcatgtgaggggagtagctgtggtttcctacaggaaaattgaggcactatcatcagaatgggagaatggtggttcagttaacagaaacaacatttgtctactactgtacataaatgtacaaaaatatgtctataggaatatattcttacaattatcaatctgtaatctacaattaaccaattttttttttttcgagatggaatctcactatgttgcccaggctgttgtgcagtggtacgatctctgctcactgcaaactctgtctctcaggtttaagcaattctctgcctcagcctcctgagtagctgggattataggcatgtgtcaccatgcccggctaatttttgtatttttagtagagacagggtttcaccatcttggccaggctggtcgtgaactcctgacctcatgatccacccaccttggcctcccaaagtgctaagattacaggtgagagccattgcgtggccatagttaaccattttttttttttaataatgaaaggtacttaaggtaaagagagcattttctcctttttaagtagatgattgatagtggaaggaacctcgggacgtaattccatacaacacgtatttctggagctttcgtttatgggccaggcactgtgctatgttctagaaatacaaagtggaatagcccctcctttcccttgacctcccaccctcatagtcagggggaacagtaaagcaggcaagaacatgaatggttacaattctgtgtgatcaatgagtagctgaggattgtgcaaggcttctaagaagttcagaagggatatctagcttaggctgagaaagcttctaagctggggtgatagacttttcatcatctggccttttcatgcctctccagctatatcctccaccttgtttccaaatgcactcttcacttagtggtgctaaaccctttttagttctctggttaaattagtctgtcatgtttctgtgcatttactcatatacttggctttgccccctttttggttctcactccctttaattaggaatcagctatgggatggcaaatctgatgaagtagacacagtgattgagctctcaggaaccttgctagcctcctcatcacgtgccttcctgtactgaaaggcgggaaggtcaaacattacatttccagatgctttacagctaaggccctggatctgattccttgtttgccagttagatgcacttgtttgagttttggaagacagaattgagactgaagccaactttctgtattctctgtgatctttgctggctagaacattggaggagacatcgggcttttgggcactcatctttcagtacctggccactcagtgaagggccactgagaagcagtggatagagcgtttattttgttgctagtgtggctttcctataaagtcaaaggctgtgttggtgacagcagctttctgatccatgttcataattcagacagtctacttctaataatgattctgttggtgacttcctgagtctctgcctttctgatggtggcagaagtagtggtactcctcgtggtcatcctggatgtctttctagagcccacagcttcagctctttcagtgactttgaagcaccccattccccagttctctctgtacttcgaaaagctcaaccctgcctgaaaaacaaacttacctctactgagactcagtctctatccaaaacttggagatagcatgacaacttatgaggttgtcatgaggatgcaatgagaagaggcaggcagggagcctagatgatagcatagcatgtggaacttgctatggaaccttgggtaaaaggttattattaacttgtgcacttgctagttttgtccattcaatgagaaaatttctgtctacaggaagcatcattgaactgaaaaagatgttttctttcatcttctcaaagaggagagacaatgtgtatttacttttgttgttgttgttacctggattcctagcccatcatttctcagtcacagccaaataactccaaactctctttgggttctagtcactcattcccttggttcacatgttgtgtacagatgcttagcatcaatcacttttcatggcttaattatctaactcagagttttgcaacttctgacttcctttgcgtcatgttaagaatagaacttccatagagccataagccgtgaaatcatgaggcagataactgaattttacagtggacgatcttcgattggagccactaagattgtgaagtaaacttcagtcttctcatctttaaaatggatatttactgcctcacaaggttaagaacatcaaactagacaattgaatagccctgcacacatgtaattcataatgctgtgcaagtggagctggtcaagataatgactaatgaggtcagtgggccacaggatatgagaagcatgtaaccattgcttttatttcaacggatattcatttagggtctcttatgtgtagatgttgcttaaatattcatttacactttgtgttgtcactttctttttatcatatacttattgagtggatattcttaccctcattttacaggtgaagaggttgatccagtgctgacttgtctgaagtgatactgactgtgtgactctagcctttggcttatttccttccttctatccaaagacctcagatttcctaacagagtttcaggtattgttgcctacaaggacatcatgcctgacaagctttgtctccatcagtgtcagtgccctgatcagttccacctgaatcatgaagccagccctcatcacatagtcacatgattgctgaaacaagagtgtctggcagctagctacctagtcatattattctggagggagaatcacagatgtaagatgtttcctcagtttaactcacattttaattgttagttttctaaagttttgcttaaatgagaaagtgtgtttctgtctcactgaggggctttagaagctcttgtaaaaatgcattgtgtgttcctgggggactctcaccccgcctccccttcactttgcattatgaaaggcagtgagaaggaagttcagttttcaaaatgtcattaattattcttccaaggtggttctggcatcaatagggattccttaaaagaaaaccattccgctctagggaggcgaggtaccgttgggaaaagctgcttcagtattttcttagttaagtttgttgtttccgtgcatttggtggaaatgtaatgatttgttagttcttactacctgtgtattttgaaatagaaaattgtttgaataatacggctccttggaggtattcatgctaatgccaaaaggacactatcataaaaatttttcctagtgaatattttattctaattagaagaggtgaaatattaaaccaaggagatattgtacctcttatcaggtcactgggttttatttgccatgtcctgtgaagttttgagcttccttttttctagtatcagactgttactaatccatagggcatgtttgtataaaatagaaaaagatactccttttgtggagacacagctcccccacaaggtacatggcctcgtgagaggggccaggctggatagcccccaactcatttcgtgggctgatgcaatgtgcggtcttaacaactgcatgttacatctgcgggtaatagaaatcttcaaggtcctatgtaaggtaaggtaaggaagcatcattcctgaactcactgggaatttgggatttgtgagcatagtctaaaaccgaacccctataaggatagaaattggatagtggctcagccctcatgaaacggagttgtgggcaggtttgagacagaatggggaagaatttcagcattatgtggtatgtgagaccaggggttagattgtcttctagtggtagtaaagtatttctgagcaaagggtgccagataatgggtctggaatctgaaatttaagttgggtttgcacagttccacagaactgtttatttttctgtttatgggatgaagaagaatatatagcccttggctctgttagtacagttactagttacacttgcattcaggaaacacaaggaatggcagctgggaagtaaccttgacattgagctctccagatgcctccctcttctcctctccttgtgttgtgccagtggaggtgtgcttgtgtaaaatcagatagcagcaagagtcatatttgttgggccaacagataaatatatatcccatgctgactatgtgccagatgcaggtgatttagtcatgagcaagtctagactctgtacttgacctcatggagtttacagtttagtggaggcaatggacagtaaaccagcaattactcaaatacatatattgttacagatggtgagacgttttataaaaacacatacaggataaaatgagagcattgttggtggggagggggcgatgatggacagtttaggtggatttagattttgagccactctactgataagaaaatgtaggaaacagacaccattaagaatccattttgccccaaattcttctgtttgataatggaagtgtctgtaatcagcatgtgagaagatcagcattttgatttcaaagaagttgcttcagacatggtattggagtctctgctatgtcctttggggttgtgcaggctcctgctgctgagacctctgctcactgccactgcccgaggtgagaagttctggtaggtcagggttagttgcttttcctttctcagtacaaataagtcagtcgggttacttcatgtagaacctcttctcctctcaacaaatgttgaaatgtttgtgtttttctccccatgatgaggaaagaagcctggagaggctagaggttgcagctgttcaagtaaagttttgtgattaaaaccccattgtaggtattccacaaatatttgaatcaaattgatttgttagctccagggtgtagggatagagtctgggctgagctgtttgatctgcacagtttttctgcttgaaacagatgctgtgcttgaaacttaagcattttctcgcctataatcttatatttatgctatttgcctggtccctgaaggcattttaaggacgtgacgctgtaccacctcagccctgggtgccgaattgatttgtttgtatgtgaccctggtaatagaaaagcttcatcagtgggtgccatctttggaatctatctatcttttgaaaacattgcacctttgagttcctgtggcactgttgtccatccacttctgtttttctgagtgtcctctgactttgccctttttatttgagattcctcctccattctcagctagatattcactccctcactggcttccctttctcttctatcctttttcatctcctttcctccctccccccttttttcctgtccacctttctctttcctctactccatatttattgagtgcttgctctgtgcctctgaggctataccaaggcagactctgctggaggtggtaatgagctagtgaaagagccatagtaccacagcttgacaccacagagtgtctaaggagtacattgaaagagaacctcaactaattgtatcaagatacagctgactcatacgtttgatgacttgaaataagtgatagctattccatgtttggaggagcatgtttacgtgtctacatttgtcggtgtctctcttggaggattggctggcaagagagactgaacaggagcccattattgtggaagtaaaaccttgtaagatttgtgaatctaggttgagcttgactgcatgtatatatgtatatgagcatgtgtgttcatgaacatagtcatcatgttgtgtgtcattcacaatctatgacctatgtaggtataaacctatgaagttttgtaaaggcctgtgggccccacgcccagaaactgtgattccctgctttttaaaaaagcttattggatgaattataaccattctacttgaaactatgatagggaataaatgtgaacaattttctaaagtagagaataaaaacctgccccattggattatctttttccagatgtctctgcgactaagtgactaagtatgttacagaccataaaatgttgcaattttatttttgaacctgttttgcaaatactggaagtgtcatggatattttcctatctccaccttggcccaactccattaggcaattacttatgtttaaacttgatttctccagaaatatagttggatcagtgactgagtagtacttctgtcccttttctttaatatcatttctcctggacgggtcatgcttgaatcactctttttggtaaaacatggaaagaccttcacttacattgtgtctcagtggtggtaaaatcagtctttaacaaacagttaatgtaagaactgtgcacagtaataaataaacctaggattccagctggcacgaagtctgattttagattgaatgacaagctctacagtattttctttttttcaagggaaggggaaactgtcacaaaaatggaaacatgtttttttttttaattctttattttagatgctatttaaaatagtcatgagcatgaagtactctatttttagatttaggtcatttgaaatgcttcctcttttaggattaaaaaaaaaaaagtcaggaggagctctggcagaggttaacattggaagggctctgcccagtatgtgaatgggttgtgctaagctgccagagctgctgtacagcagaccatgtaggtgactctgccccctggtccccacactctcaggacaatcttccacactggggaagagaaaaagagataaagaattgaaccacaggggcctcccacacttctccctgtgtgatttatttatgaatcacattagctggtagacaagatgctgagccataccctttgcagatctctccctctagagtagaagcaggacatctgtgcttgccccaactcattccctgctctacccctccaggcaggagaagttttggcagggagctggctttgagcccaaaggattgaaatgaaatttgccttttattactcagtttccagtattttattagcaagggaagaattgaagtttgtgggggtagagaaaggcagaaacacggagaactttggagtttctctggccgaacacatcagatttccagattcccaggcttggggtatagccctccttcatcagcaccagcccatgtcttcactgtccagcctaaggttttaagagccgtgaaagatgttccatctcaatcataaagaccaccggatttccattagctttttagtatcaatccacattaaatccctgtctcctggtagtctttcatgtttcggtaggtgtacagtcactgctatatttaaatctgtattgggtagatgtttgtatattaacgcttttagatgctatttcagtatgtcatttgtcttcagtaatctaactcaaaagcgaatttaagtgtgatgttcttttaaagatcactcaaatgtgataaaaggtgttagatggtgggtttagcaacaggaattttgattttaaaaaagttttctactatattatggtggattattctctggcattttaccttatttaccttagctgttgaatgtagatccataaaaatcagcatgacaataagccagcagaaaggtagagacaatcaggggaaaatgtacagagatttttcaaccatccagtaaatctcacagaaatacttatcaattcattagcccctcttagtcacacagaatatcctcacccatttattaacttttgggcataggcacaattctaaaagtatcttccaactagggatgatatattaaatatgttaaagggctttctccattcttttaacatctatcaagggcctgtagtaatgtttgccaataccattaacttttgctagccttataatttttccccccttttcaaatggtttacttttctttctcttaaggcaaaaagatctgaggtcatatgttcattcgtttaacaaatacataactagtgaccatctaacctgagccaagctctgagttaaatgcatgggatgtatctatcagcaaggccagctgctttccatcctccggaggcttgtgtgatagtgagagaatatagttcacacacacacgtggagatggataacacaatgatcaatcagaattattatgaaggaaacaaatgaagagtgaagagagaataatgggcttgggtcagactaaataagggggacatggaaagctctctggaggagggttctgtctcagcctgaaagatgtgaaggtccgactgtagaaggcagatggagagagagcactccaaatcaaggagccagggtatgtaaaggttctgggttgagagaaagctaagctcagtctgtttgacaactggcaaagactagttggcactttatagatgtggagagcttgagagtgggcctctgaaacagtggaagggagttcagattttatttctgatgcaatgaggagtcataaaggggttttaagtgaggaagggacctatgtgattggctttgagaagagataggaaagcaagcagtgtggagaatggactgaggagggcagaggctaccaggtagaaggctgctgtctcagcagtaggggaagatgattggagtctctcctagactggcagcagtaggggatactgatgagttcaggcttggggacaggattgaaagagaaatcaaaagggccttcttaggcaaaagagaaggagacatatctgtgggtgccaccttatagcagggagaactggggggaaaggctgtagctgcccttattaggtaggaacattgttttataaaggacacagagcataggcagttttcttgacaagctgataatataatgggatcatatagtgcttacgttacttgaaagtgtgagattatatgaatctgtgcgaatatgagtattggttaaaaatggagttggacctctgtatccatgggctctgcgtgtgtgaatttcatccactgtggatcaagaatatttgggaaaaaaaccataaaaagtaatacaacaataaaaataatgcaaataaaaacaatacgttagaataactatatagcattacattgtgttaggtattataagtaatctagagatgatttaaagttaatgggaggaggtgtgaaggttatatgcaaatactataccattacatatcagggaattgagcaactgctaatttttgtatatgcaggggtcttgaaaccaatccaagggatgactgtgggtttgtgtgtatatatgtgtatatatgtgtatacatacatacatgtgtatgtatgtatatatgtgtatatatacacatatgtatatatgtgtatatatacacatatgtatatatgtgtatatatgtgtatatatatacctttctactggtttattgtcacatatgtatatatataaacatatatgtatgtatacatatatgtgtatatatgtgtatgtgtgtatatacatgtatacgtgtctatatacatgtatacacatgtatgtgtatgtatgtacacacctatacacacatacacacatatatatgtgtgtatatacacacacacacacacacacacaaacacacacacacacacacacccctattcagtaagactgtattttgaacaaatatgccagggcttactgatgccctttcaagtaatttttggaaaggaaataatttttcaacaatgtgggtgtttctttatttttgtatatgatttcattatttataggtcacatgcccagtgttttcatttttgaagttgtataaaaatacagatcagttgatatgagcatgtgatgcagaatctgtaacctgagagtcatgccgtctgagttccagtcttacatccatatcccatcaggtgtgaaatgactttacctctcagaacctcagttttctcagtgacataatgaggataaccgtggcaccttccttatggagttgttgtgagcatggatagtgctagttatagccagccgttagcctgaggcctgccatgcagaaaagcacaataaatgttaactgataatagtgaacatttcagaattagaaaggtttcaagacatagtcttgttttaccctccagttttagagatgagaaaaccaaagccagatattacatggcacgtatcacacagctggttagagacactcccagacatggggacctttccctttgcacctttaatgattgctctctaaggttccttttcacttttttccggtagaattgattccatgggaaagaggaacttctaacaaaggtagaagaggaatggcatatcaccaaaatgcttagactgtgaatttggacatcgagtgtgtggtgtgtgtatgtaggtgagcgagagaaagagagagataatcctaaagagaaatgtaaaactctagaaaagggcacaaaaacagacacagtgtggaaagggtgagaagagacaggatttttgaatggaaatctaagcatcattaagaagataaatcagataagaattaaaagttcagtatattctataaaattcatgataatatattggatatcactaagatccagaattcaataatgggctgtacattaatctgagagggttttatatctccttaactttaacttgataacaaaacagatgtttatatttgggatgagaaaaaaagcaaagcaggatgaatgaagcaaagcagaaaacaaaaagtaaattcacttatagtagacttagggcatctcctaggactttacgtacataatatattactcagaagaaaaggagtttgatacagctttgttaagagcctcgaaatgtggatattcagaacatcaacatgtagtctaggaaagttttcagtttggcttcaaaaaccctttgacatggataggtacaaaagattcatacatatatttacatgtacaggacacttgttgaattcattcagaggaaattctttgtaggaagcagatgtagaaatgtaaattgatgtgcttttagaaagagaaagaagaggccaggcacagtggctcatgcctgtaatcccagcactttgagaggtcggatcatgagttcaggagataaagaccatccctgccaacatggtgaaaccccacctctactaaaaagacaaaaattagctggatgtggtggcactcacctgtagtcccagctacttgggaggctgaggcagaagaattgtttgaacccgggaggcggaggttgcagtgagccaagattgcgccactgcactccagtctgggcaatggagcaagactctgtttcaaaaaaaaaaaaaaaaacaaacaaaaaaggaaagaagaaaagggaaaattaagtatagagtaaccaggaaggaaaggtgtgaaatcaatgaattatctaaattggaaatagaattacgttgttaaaaacaaactgaagcaattcatcttggtatctgtcctgcaaaatgaatgtctattatgtgcaaagaactgtgttaggagtcttgaggtatatggagatggaataaccagggagcttgcctcagaggaggtcacagccttatctgttcacctgtgcagtgttcattgagcatacatggaatggactatatcatttctatgtccaatccaaatcacagactctgctaatcaatcccagcactctttctacctgatgctcagttactatggtgatcagttggttgcagagtaattcttacttgccttctgggcatgtggcccagttctgccatagaagcagattggtgggtattgtttgctgtaatatcttgggtacttgccccagaattcagtgcatagtaagggtttgtattagtccattttcatgctgctaatagacatatccgagactggacaatttataaaggaaagagttttaattgactcacagttcagcatggctggagaggcctcaggaaacttatagtcatggtagaagggaaagcaaacatgtccttcttcacgtgatggcaggaaggagaagaatgagagccaagtgaaaggtcaagtcccttaaaacatgaggtcttgtgagaacttactatcacaagaatagcatgagggaacagccaccatgattcagttacctcccactaagtctttcccaccacatgtggggattatgggaactacaattcaagatgagatttcagtgggaacacagccaaaccatatcagggttcaatattcaattcacttattgaagtaaaacttatcttcttttagtcatttattctcatttcatattaaatactcaatgttgtttcaacactgatcttcaagttactctgcacttgtatatacttcatatccatgcatatacatgcaaaatttaacaatcttaatattacttgaatattaaagtcaaaggttttgctgactttgtgtaacttactaaggctaataaaatgtacttgcaggctgcatgagatggctcatgactgtaatcccagcacttggagaggccaaagctggaggatcacttgagcccaggagtttgagaccagactgggcaacatagtaaggcctcacctctacaaatgtatacatattggctgccatggatatatacaaatatatatattagctgacatggaggagcacgccaatagtgctagctactcaggaggctgaggtgggaggatccttgagcctggaaggtggaggctacagtgggcctagatcatgctactgcactccagccagggtgacagagtgagaccctttctccaaaaaaatagatataaaaaataaataaaatgttcttatttaagcataaaaaataagatgtatatcatttctggagagtaacttagtatgtaaacttgttgaatatgaatgaggttcatatcatggggagtttattaacaagtaatagccttgtgaagttgtagaacatttccagggctgggtggaaagggggaggaagttattttaatcacttgcagaagccatttatagacctgtcaacttttctgccatgaagattatcacttaattgtaagataacatgatttgctatttagatatcagagatagaaatgcgtaggctgggatcaaagtggaaatcaattatctaaaggtctgggtactcattaataaagttggtgcagctgtgtgcctgtcagcctcccctgggttggggtctattttaaaaacattgcgtgggctgagttctctggcctgtgggtcagagaggatggccacttgtaaatctagatgggatcgcttgtgtaattgggagattgcacaagtagaagctagtgataaggtacctgatctcaccaggcaggcctgaaaagtcctagaatactagagaagagtgtccaagggctctctcccttgcttgcctgcatttatcttgaaatttcacaggaaaaatggcagagatggtggttagaacaaaggccactagttacggaagcgcgcacctccctgcaggtattagctcaaagaggaggaaactcacaagccagttggtgagtagatatgataagagggcacatttcaggtctcctgaattttcacactaggctttctgaaaatccccagatctggcatggggagaaggattggggaaaatttcttatgactcacattgaagatccatttggcagggacattgttgaggtaaatgtggtaatacttcagcatttatgagcgtgtgctgtggattgggttgactctggcttgaatctgagttctgttgtgaatcaaattctgttggttgatactcatgtgggttttatatttccaaggtttggttttttgatttgaaaaacagagatgatgatagcaacctcaggtatacaacttctatagagcttgtatgggatatgtgtccaataaacggtagctgtttgttatgacagtggtagtagttagaattccatgagagatcatgacttgtttgtttgttactgtattccctaacttcaaacacattgtttatatcagacttccaactggaagagagggtacactcaactgaggctgcgctccagagaacttctttataaagggacgatatagagaggcactggtggggtttagaggaaccacaaggttagtacaggaacctggggatggtaagcagtggagttttaaagactcaagcccaaagggataaggtgagggagtggtactgcaacacagtaggagagatgtttgggaaaacagagtactttgggagaaacaggagatctctgtgattggggccttggtctgatctttctgctagatcagaccaagttcttgtttttcctctcatttggtatccttatgaagccctcactggccaacttgcaggggaagccagaacaccaaggggcctgtcagtgtagtccacatagatcagccttctgcagcacagaacagagaaagaaggggaggaagagatttgaaggagcaaatggactgtcacagtgtttcacacaaagaggcctctcaataaactgttctgaatgaataacacgtgtcatgggtagttggattagattgtttcttcaaagcattgtttttttagtgtactcactgtgtgttagctgctataccagaaggaacaatgaataaagccaaatgcagtcctcccgagtgtctctactcctcccattttgtaagtacattacatatacatacgtgtgtgtgtacatatatatatgtacacacgcacacacatatatatacacaaacacatacacacatatgtatatatacacttttttttttttttgagacagtgtcttgttctgtcgcaatggcatgatcttggctcactgcaacctccgcctcccgggttcaagtgatgctcctgcctcagcctgctgagtagctgggattacaggcatgcaccaccacacctggcttatttctgtatttttagtagagatggggtttcaccatgttggccaggctggtctcaaactcctgacctcaggcgatccgaccgcctcagcctcccaaagtgctggaattacaggcgtaagccactacgcctggcctacatgtgtattttaaaaattaatttgcacaatttccctctaaggtaggctttattaccaccattttacagaaaagatatcctaatctctgagaggttaacagacttgtccaaagttgtacagctggtaagagagcaaagtgggaactctagaccctggctggctcttcatctccatcttgctccatgacctttggaggtcagcttcttggagtggctgctggatttctccacagagtggattgtgcagctggtttagcatgcatttcctttgagctaatggttgaatgagttcagtatataatattgtagattgtttcagctatatctattctgtaagagacatgcgtgagaagcatttgggaacttactaaaatagagaatttggagggccccatcagatctaatatgtgggttttgacccctagcaagatcctcaggggctagttgtgtggccaggctgacagtggactctgctttcatgaatcactgaaagcttggacttctcattttacaaattgggggagcaaagtcgagagagtcagtaatagtggcacatcaaggctagttggtgtcaaacatgggtatttttgttgtcaataaatcaaatcaatgccaaataagagtaacattagctaaggagtataacctaaggatgggtgcataaagcttatttggctgcattgctctttggtagacatgcttctgatggctaaatgtgaattagatgacactttgattaaagaagatgcagtctaacaacttatattgatatagtgtatagaacaaggggaagcactactccccatatctagatcatttttgcaggcaggatgcaggataatggagctgacttgaagtcacttatttcagatgagcatgggctgtgttataagaataggtatccaaggatgaagaaagacacaaacatcagggaaaacagaagattcaagtatttttttttgaaagatagacattttattaatgaacctggttttagggcagatacttgctagctcaagaaataagcctttctgagcataattgctacagggactgttgaagacggctagtcttcaaactggtctggtgtctctaggaggtacataaattgttgttttaaaaaaaatgtaggccaggtgcagtggttcatgcctgtaatcccagtgctttaggagggtgaggcaggaggatcacttgaacccaggagttcaaagctacaatgagccatgatcatgccactgcactccagtctgggcaacagagtgagactttgtatctctctctctctctgtctctctctctctctctctctctctctctctctctctctctctctctatatatatatatatatatatatatatatatatatatatatatttttagtgcatttctgttaatggaagtgagaattcagacaaaactaagtcgtggataggaatatactcatgtaacaaatatttttaagtgtctcattccaggttgaatgagaatccagtgtattctcattcagtagtatactatcactactgaagtataatgatagattataaattattttagcagcacttgcagtggtctgcttaatccactaaacttaaagtgggcactggcgttctctcatgattagagaaatgaagttgacaaaggaggatttcttaggtagctgctgaagcactgacagcagtgattgggtttctctactcatcatttgaaaatcaattcaaaagactctgtgttggtattaaaacacattaattctttactctttcaacgatattttagaattctctataatatgtttaatgaatcagagtatataacacatttgctttttttctccttaaggaacagccttttcacaacttctccctaagtttgtatttattgaggttactcagtctcttatagaaagataattcagagactgttattaagacaatgtctttgactttagaatgagtttatgtctttaaggatagttttcagcaaatgagccaaccatatgttaaatcaagtttaacatccattatgaaacactgaatcatactttatatttcagtaatgataacaaatgatcgcttatctcatgtgcttctcatttgtactacttctcatcaatcttgctaatactgcaaagatttatgaaatgaacaagtgtccaactgtaactgttaatattaatagcttctttttatattttctctcactggctttcttttccgtgcttgcttaagcctactttaatataggctttaaaagtaatagtttttcttactctgaaatgataattaacagaaaactaggaagtcagtaataaaattattttaatgaaactgcacaattataccagcccattacaaggcataggattgctctgtgctcagcactagaagccaaaatctttttttcacttgtgtaaaacagtccattttaaaactctggaaacatttcagatcccttatgacttaaaattgctacttgtgcagtaaaagttaaaatcacttgagtaaatttgtaatttaatctttaaagtttaactaacatttattcttcccttctaaatggtttcctgttggtgtaaattgtaacaagctgcctctatctttttctagacttcactgtgggtctttaagtcaacattccaaactctccccagccaaagtttctagaagagatttcaccagatacttttttctctgaggctctgagtgtctatctgtccttcgtgtcctgaattgaatgttttcaggaggggctgctttttcccataaaatgatctcttagaggtttaaacccctcctctgttcttgtggctagacactgtttacctaactcctagatttttaccaccacctcctgttcgagttccaagacgttcatgtttcctcatggattcatgtatcctgaattcctagcaaaacaaatcttgcccagtctttctgattcctagttttatttcatgaactcaaatgttccctgagggccgggattcaacacaaatttgttttacatttcccacaattccctgctttgccccagacaacacgtatcataggatcttatctgttgatgtggttgtaagcaactctttgttaatgacaaacattatactaatataatgtttttattagaatgctgaacacttctttctagagtaattagcagtacatttgagttgacagttgtgtgttgctttctaacgtctcttttattatctctaggcgtttttttttagttgcaatttctcttctgaagaaaagaaaacttttgtgcattctctcatttcttctatcacaatttaagatttgcaagtgtagtctgtttcatatttctcacaatacttaggaaagcagattatacttagcaggcctgataaattatccttggtttgagcaaagagtgaaataaacccaaatatattatttcttagttgactgtagatacaacattgtgaaatgtctcatagaattagaggcatagagtttcagaaagggaggcttggagaagggatatgactgataggatcacaggtttatttcatacatagttgttggagtgggaccaagggatggcactgtgacattaggcacagggctaatgtgtgtgtgtgtgtgtgtgtgtgtgtgtgtgtgtgtttgttttgtttgtttgtttgttttttgagacagagtcttgctttgtctcacaggctggagtgcaatggcatgatctcagctcactgccacctccgcctccttggttcaagggattttcctgcctcagcctcctaagcagctgggattactggcacgcaccaccacgcctggctaatttttatgtttggtagagatgggatctcaccatgttggccaagctggtctcaaattcctgacctcaaatgatccacccacctctgcctcccaaagtgttgggattacagggatgagccactgtgcccggcctgtacacatgtattttcaaactgcagttgactgcaggtaactgaaaccatgaaaagtgaaacagcagataaagggggaaactatattggattgttatatacattattatagtcatattatcgattatatatagatcacattttactttagtagcattaatatgtaacagataattactactaataataatgttggacataggcttctgtcttcttacagccttgattgctgaggctagtgaaccattataggggtagtttaaattgcccacttcttaaatggtttagtagaatgaagacatgatcaatgatttaaaaaaagttttttaaatgaaatcacaagaagatttcatgattctttaattatcttttgagggtttcaggaggtcaggcagagaatgaaactcttaaggctctcttatgattttgtggagaaagccttttaaaactcattgcacatgatataaacctaaaggcaaaatttgggaactgctatgtgaagactgataacagtgtaaagttgttcgctgctatgtgagcaaatggtggaaaaaaaaaatcacttagctgagatataattaaagtaagaattaataacctgagacatttaagtaactgatagtccccaggaccatctttaggatcctgcagaagagagaatgagtgagtacctgtcttgaaacttgctagtttccaaaacttgcctattgctgaagatgatattgaatattttaaaataggctgttcaaatacttcctttaaaaaatgctgtttagaatgtttcccatttgatccacaattaagcttacattctcaaccctacagtaaatttttatactccagtcctcgctgctgtcgtactcttaatcaaataggaaattgcttccctgggtttggccaagttggagcaggaagattgtgcttcatcagcataataatacctaaaattatgccttccatggtgaaacctaataaaaatatgcaggtgccctgcatgggactatgaatttcagttcagtgaagttttatttataatatctttaaccctgcctcagaatcaattctggctttgttaaagatttcatgcttagcaaataactactacgtgcaggcactgtgctgatctctgtggaggaaactgaaatgattaaggcccagtttctgctgccagagagtttactgtccagttgggtggacagacaggcatacatcaggcaagactacatgctcattgtgctgtatattgtgggaatgctgagatgggagaaattgattttaatgagaggactggaaaaggttggtggaaggtgtgatgttcaagctgggccttgaaagtttaaactattagaaatgtggtaacagtgccgtaagcttcaggaatgttgattaggctgattttttaagcagggaagaagcagctgatgactgtgataccagaaaggcagggtaaggacagatttcacaggaccctaaatgccatttgatggtatttgggcttgattctgaaagcactggggagccagtagagttttataaaaaggaagtcatggaatcaagtatgtgtttaatgaggataaatgtgacagctctgtggtagatttgattagtgctacactggagggacggttgaagttttaaaactgggaagggaaaaaagcctgaagaggtagaaattgagtcaccagtactcaatgagtggttagatgctgaccataggaggcaagtatatgccaacagtttatttccaggtttctagcacaggtgagtcttgatttccttacccgacacgatgacagtacccatacagggacaaaattaattcatagaaaaccttgtttcaaagaaacaataaatatgcaatacccctcccatatatcctggattttataatgctgttagttgtaagtacaccactgatttcatattttggaaaaaatgagtgcttccatattaaacatatcaattacaagatgcatcttcatttatttatgttaaaaacataaaataggcatcttaaaattaaagaaatataggctgggcatgatggcttatgcctgtaatcccagcactttgggaggccaaggcaggcagattgcttgaggtcaggagttcgagaccagcctggccaacatggtgaaaccctgtctctacaaaaaataaaaaattagctgggcatggtggcaggtacctgtagtcccagctacttgagaggctgaggcaggagaatcacttgaacctgggagggagagattgcagtgagctgagattgtgccattgcactccagcctggatgacagagtgagactctgtctcaaaaataaaaaataaattaaaaattgaagaaatagggtaatgaccctgaggttttttttgtttttgtttttgagatggagccttcctctgttgcccaggctggagtgcagtggcagcatctcagctcactgcaacctccgcctcccacgtttaagtgattcttctgcctcagcctccctagtagctgggattacaggtgcccgccaccacgcccagctattttttttttgtattatcagtagagatggagttttgccgtgttgcccaggctggtctcaaactcctgacttcaggtgattcaccacccccccccccccgccgcccccacctcagcctcccaacatgctgggattacaggcccggaccctgaagttcttaatatttactaacttctagtttattgcccaagcaagtaattataggaggtatgtactttctaatattagcattcgtttcttatttttgttaattcactgtgtgaccttgggcgagtcactttacctctggggagaccaaagattctaaagtaattgaagaaagcactgtaggaagctcctgacagtattatgcctccctactgtcagtcaccccttgacatattccatcattcagattaaaataagagattaccaaaacgctacctatatttgaattttaaaagttaaatttaaaaaattaaaacagggccgggtgcagtggctcacacgtataatcccagcgctttgggaggcttaggcaggaggattccttgaggccaggagttcaagaccatcctggaaaagaccctgtctctacaaaaaaaaaaaaaaaattaaaaatgagctggatatggtggtgtgcacctctggtcttagctactcaggaggctgaagcaggaggatcgcttgaacccagaaactggaggctacggtgagacattattgcactactgcactccagcctgggcaacagaacaagaccctgtctctaaaaaataagatatcaaaatacattataacaccttgctgtacattcacgattactgtgaggtttgttaaaagataaataatatccttggtctcaaactcaccgcttggatcatcagcattttgcaagaatggaggtcagaatcccatcttttaacaaactccacaggtgattctgatgcacaaccagacctgattttcactggtgcctgacagcctcatggatatcctaaggcatctgggtactgaccctgcagttggtggtctttcttcctccttgaacatcctgaaggttgtacagaggaagcaggggatttttttttccttttcactggtggcctctatagtcctacatcttcttaaccttcatcatctacccttgcagccaactttttaatggaatcagctcatctgcattctctgcgcgtctgttcatctggaccctcagcattggcaagttgttggttcttcatcatttgctttgttacaagtttaataaaaaaaggcacgacttaaccataattcacatttttcccaattaaccatagcaagctcctaaattcttaagaacataaaaaatataattacctaggtgataaacagtgtctttttttttttttttttttttttttagataggaagtaatagactttgggtctgtctggatttaatattgacattatagtacaggaatgctaatcactgaagctgtaataaaaataaaaaaatttaaatcctcttttctatacagtattatattctaaatttcaaatgggaaaaggcaatttgaacttccatattttctttctagaagtttttgccattctctaacctattctactatttacccaacttctttcattccaaatacagacattttaaatgtcttcggcttgtagggctcccaggccggggaagaaataatcattcccttctggaattcaagccaactactggaaatcttatcagccatttagtccaatgcatattaaaatttagcaattaattatctctagttctaatccagtaagcctgtacaattaacatcagggattcagttcatctttttgctgactttctaatttaaggattgggacagagtggatctccctagaagatgtatttaataacaattatttcctgtatttaaatcatttttttaacccatggtgcattttgtacaatatttccgtaactttttctagaggggagattgttagcggtaaataactcaaaaaatagaagggaaattttgttactcccttaatttttttgtgttttaaaattgttagaatatcaacatcacctatggcaggaaaaaattttcatatcaacagagaaagtcatttgcgtcatggtgtgatttctcagtgccttgctcttccttcttggccaatctgccttacctgcttgcttgatccttggaattgctttaatattggggctactttttatttcaccattagaggataggtagactacatatttaattagaaatgccaggaagagttcattcttgagctttaattcatactgtcttgtaatgaatgaggggattctttttcagaattgttcatgatgggctgtaaaaaatgaattgtctcattcctaggtaaacagtatctcaaggaggtgagaaaagaggaaagtacataatttatggagaggcaagaaaagaggggctctgaagatgggctttatgatttttattgaaggctgaggatcgagttcaaatggtgatgcccgctatcgagaatacttagtgccactgttccatgagatggggctccagctttttcatataaaagttacacaccgccttttccaggaagcctttctggctttcaactacaatataattctcatgctttttttgtttatatttctactttacttacattacagcctttgtaccaacatgtgtctctttctccagaagttctcctaatgtcaggaatgtctttgtatctgtctactgcttctttttctttgtcataacaccttagcatagtacactggtctatacttaacactaacagatttaatatgtctagggaatgagtgttcatgacatcattggatgttttctaatacacttccaatttattaaagaatatttgaaaaatggagagaaataaagagaagagttaacattaattcaacttctcatctataaccatcattaacatttgagtaaatttccttccagtgctttaaaaaattcctatctaaatgcatatatggataggtctttgtagatttataatatatatgtattatacatgcacataatacctattcgtgtttgtacattttgtgttctacttttttatactttactatgtcaatactttttcattttatgaagtattgaaaacctgatttcttaatgtctttcaagtattcacctttgtgtatcagaatttgttctctcatttagttttttacagttttgttatggttatacataaaactgtgacaaatgttttacaactaatctttgtctgggtctctgatcattacattggcataagttgccagaacgctatgaataaatattttgatatgtaggccaattttcccttatagtgacatatacctgtggcctctgaagacttgaatataaatgaaaatactctgcctatttttccaacaaaattaccgttttattatttaaaatcgtagttaattgaatatagtgaagttgagtattttatcatatggtagttaaccacatatatttcttattctgtgaactactcatgctttaaatttagttttctaataaaggatttgtaccatattgatttgaatagcactctgtctgaagatgttagctcttcgtctttaatacttttttcaatacatattctccctattctttcacttcattttattgataatggctttggggagctgaaagttttaattttctggggcgttatgtttcattttttcctttgtcattttgttttaagatctttatacttaaaatctattttaatccagataaaagtttcttctgtgtataatatggctcaattttctgctcttattttattaataagcatgtgattaattttaatatttgacatgagatgagaaaacaatgtaacatattttccttaaatagttagccattgtttgttgaagagctctttcttcctagaatctgccttgccaacttttatcagacagcggcttttcagtatactatgattcctttctggcctctctcttctgtcagttgacctggatacccttgaatcagtacacttccaacaattgctattactcttcatttttaattttaaggaagatttttctttttgaataagtttagcccatcagtgcaagatttcccatgaggctgagacaggtgcattgcttgagcccaagaatttgagaccagcctggcaaagacggtgacacctcatctttagaaaaaatacaaaaattagctggacttggtggcatgaacctgtagtcccagctgctcaggaggctgaggcgggaggatgacttgagtccaggaggtgaagagtgcagtgagctgagattgcaccttcactcaggcctgggaaacagactgagaccttgtctcaaaaaaaaaaaaaaaaaaaaaaaaagatttctcttgttcttccttattttaagggccatttctgtgtattagtgtgtacaattaattgcctgtttacaagaaacaatgggagagtctgtcattcagacagagccagggaagagaccagactgtttgaaaacatgatgctattgcttatttgtgtatctgtgtgctcatgatcttaggagttggagatttttaaattctagtcgcagccctgctcctaagtagctatataaacttgatcaagctaattaaccttactgggtcagaatttttaaaataggaatattcatactgtttaccttgtctgattatgaggattaagtaagtaatttacataaaaggttgtgcttgttttataatgtattttttatttttatttttgtttcttaattgtggtaagatacatataacattatatatatatatatatatatatatttttttttttttttttttttttttgagacggggtcttgttctattgcccaggctggagtgctgtggcgcgatgtcggctcactgcaagctccgcctcccgggttcacgccattctcctgcctcagccaccccagtagctgggactacaggcgcccgccaccacgcccagctaatttttttgtatttttagtagagacggggtttcaccatgttaaccaggatggtctcgatctcctcacctcgtgatccgctcgcctcggcctcccaaagtgctgggataacaggtgtgagccaccgcgcccggcccaatgataaaatttatcattgatcatgtttaagtgtacagttgagaagtgttaagtacattcacattgttgtgcacccgtctccaaaacacttttcatgatactgttttccaatgcagctgtcatcgtagaatcttaatcttcatgtaccagtagtcctcctttgggccaagatttctgatttatgcatcgctaatagtagggtacagtgactggcgcatagtagatgtaacactgaatcccaaaagactaaccagttagtagattcactgtgtatggccacacacacgtcgaacagctctctctttctcatccccttttaaataaactgctaagctggcctaactgggaagaacataagcattttattggtaaggtttctgtagtacatggattatagcctattcatttatgcattaaacaatttattgaatgcttggtatgtgtttcatgctgctgtaagtgttggggatacagacatgaaaaagacaggatccttaccttcacagagcttgcgtcttagtagggaaaggagataaggagcaggcaaataagtaaattggcaagataatttcagagtgcattaagtgccatgaagacttacctattggtaagcagacacagaattcatgggtcaggagaagaggctacttgagattggatggtcaggaaagccctcaatgattagatgttatgtaagcaggcacactatagactacactgtggttgacactcaacagattgtccatctgagccaatcagcccatagcattccatggtcagtggtattcgactgtgagtcagcaaatggcttaaagtggttccataaggagtaaaggaaggccttctatgccatagccaggaaagagatttttttcttctctactgttagaacatatcaaaggctgtggcagccttgattgctgcttgcttccatcatgctcctatgtaaagactcacccaggaagctggtattttcgtatgctctagatgaatttatgtagtttccattctatcctcattcaagttaaagttgttgcaaaactaaaagcatcatttctcagattctcttttagccagcttcaaaaaaagtcttctccaattagatgtgtatatgtgatgtgtggaaggtgaaagcgatgtggaggccatatttcagccctcctttggctgtttctgctggtaaacgtagctgtggcaatgtccaggttccctgcagtcgtgtttttctgcccactctccagctttctgagttttacgaaatggttgggatggcagaagcagcagtggcagcgctatgatctggcttctgaaactcgggaccacagctacagataagcattctatggtttcttgcattagtagagtcagttgtaatggtgacaagttcttgattttactatggctccaagacagcttcaggaggagtggctccttacaagttccatgaggtcaatgggatattgttctgggagtccttactgaaggctctacctagagttgtactttcagccctccaagttatttctccagcaccaactttgctgtattaaatctcccctgcttaaaatatctagaatgggttctgattcttgtacttgaacccaactgacacattgatgctttcatgagcaaagagaaataatcccatacttagcttcactgagccacttatcttagtgtgtgagacaataatttctcttatggtttatgcccgttttagttgggattttctacatcttgcaatagtaagcatttaagagatacaaataatagaggcaaaaaagggctaatctggaaagcccttaaggaacggtgtttcaggcaaagagttggatgtttaatttgaggtgtctcttagatgtcaatggggagatgcctgggaggccttggctgtgcaagtctaaaccttaacagaaggctcggtatgtggatacaaagctgaggtaggacaagagctagtctagaggcagagccaagatagggaccacttttttcttacttcttcagtgggtagtttgacagcatttcagcttctttgtaaatcaatagtctgttccttttggacaaaaacactgaattttacagtagcaaaggacagctaattatagagctttaaatgtagtttatttgtgcaaaatggagtataaatgaaaggtatttctcaaatcaccattgaaggaaagatagccccaaagaaatgggtaattacattgctggaagaaactaatctgcatgggttggcatcatttttctagggtgtcagtaggagtctattatatatcagtggttttagagggatctcactaccaacttttgttgttattctttaactgcacctttgggtgaaaagcatatgtttgtcttaccagaggggcatttttaactttacactttgtttttactcattccagatttaagctaggactttatccttagatacaggactgtatccttatatacgggtatatgtgaatttataagtgaatttctctaacactgatctaaattctgaacacagtctatgtaaaagactagaaaaatcaatatgcggtgacattctttagtagagaaacaacatatactttttttttcttctcggtctatcagattacttttttttcttcttggcctatcagatcactctgtagtgtactcagtattttgtatagttcacctctgacaatatggatgtatgagttacttctgacccacgtcattttggtatctgtatcacaggagactctcctaggctttgggaattgtttcatgggacaggcagagtagagaaacacttagcagagattagatggggtgtgttctgatatatatggaatagaagattttagttacataattgaaacatgaaaaattaaaggcaatcataaagtcctaaagtgggaagaaatcttgagtggtttttatgtcaaaccccttccttaactgggtaatgatgaccaggtctcaaccttaatggtaattgaattaaatcaatgaataactgaaataaccattatatgtaacacttggtgcttattttagataatctatttcaaacacctctatgaagtcatgttagtatgtctgttttacagattaagaaactgaggctcggaggtgatgtaacttatccaagaatgcacagctaccaaagatggaaacagaatttgaacttacgtaaacttggctctgaatcacacctgttttacatcactaagccataaactggtgtctatttggtgatctttggattcattagggtgagaagactctcttaccctgctttaatcactccttagaatcattttgtcctgatcagaaagtataaatgttgcgaggaatgtggtgattacttagttcatctttgtgctccatggaagaaattttcaagatggtgaaatgagttgagagattgtgacttattctgagcccacttaccctgcttagagatttatactgaatgttagtatattacatgatatgaaatgtcctgatgcttaacccaaaaattccaaattattttggaggcaaacttttattatcattctatggaggtagcccaaccccccgtgtcctcatatgagaggacgctgggaatagagtgatgaagaagattgtccctggaacacaggtttcctgtttcctttatagccataacattgggctaatttaggcctaactgagtgcgtgaatcatggagtatttctgatcgaggtctcgaaaagaaaactcctttaccttccaagtagttttttgagaagcaagtatcaaagcactcagctgaaaaatgcaagtttggattattattaacttatttaaagaaaagtgatttggggaagtacgagaaatacatcattggtttaattttggctgctactgtgggtcagtagccaactaagaggagaaactgggctgtaaagaagaacttcacctgcagaaaggtcagatttatgcagaaagccagcaggcaaagctaagaacatgtcttccaggggcctcaagttccattttcaccttttcttcttggtaagtctcagtactataggatacttaggtacacataagccattttctgccgcatttaaggaaaccattaaccacttgcttctgttattctcttcatgtatattcagcccctttctctgttctgctttgctggacctgttgggatttggaggcctttggaacataaaccctaagggttgtgattcttctcattatttggcccaagaaatatctctatttactctctctttaggaataagccagacatggaatttttttttccgttccctaagactcacttatagagtaaaagtgggaaatatttcacttttgggattgtgttttatggagtttaataccctctgagatgcgtgagatgacatgaaaagttcaaacacaaactctgctgataaattccttgtgtgaatgacattaactgaagagctaatatttcttactgggcttttatgctgaagttagaaaatcaggcccattttaatatatgagatgggggagaaaaaacttcctggctgaaacagcattttcattttatcactgtaatctgtctctctccctgcccctacccccgtccccctcttttacagcatctagagcagaattaactgtttgtgaggctcttttagttaggaagctcccagttagcaatgcagaaaccagctctggttatctggtgtgaaaaagaaaattaccagattaacaatgagaactcaaatcttagaaaagagaaggaatggctgggcatggtggctcacgcctgtaatcctggcactttgggaggttgaagtgggcagatcacttgaggtcgggagtacgagaccagcctgaccaacatggagaaaccccgtctctactacaaatgtaaaattagctgggcttggtggcgcacacctgtgatcccagctactggggaggctgaggtaggagaatcacttgaacccaggaggtggaggttgtggtgagctgaggtcaagccattggactcctgcctggacgacaaaagcgagactctgtctcaaaaaaaaaaaaaaagagaagtaactgggacaggattaaaggccaagaaatgctaagcacaaggtataattttagcatgatctgtcgagctaggagtcccctgtccttcaggctctggcaagagggagggctctggtcagtagcaggagctggtcatttcccatccaaaagagtttacacagtaagaattcaggcataggtgggacacaggggtgggtactagataggcatgaaataaaaacaaaatgaatacacagaaaaactggacaatgaacccctggagggagtgacattacctaaccttttgacttaaatggctgagaaccaacttttgagctagcttgaatttagttgtaatcaaagctctcaatagttgcttctgcaagtacagaatattaaactgtgtctaaacctcccatctgtctagtcaattcagaggaactcccccatacaacccaagtaaaaacataatgccttatgatggaaataaccccgaagtggacacattgaattagcttttaacttaactgacatgacacatacggtcaaagtcaagcaaagcactttccggacccataaaactgtattggattaagttgaccaatctgtcaaagtaaccaaactaacatatatgtgaagatgaaaccttgaagaaaagtttaaagaggttttgtccactctgaatgtcctttcacagcaaccccagagtagtatttgtttctttgtttcaaattaaatgattaaatctggtcaaacagataatgcctcaaggaagcaaatttagactgtcaacactattctttcctgtatttataaaaggttgtattgataaaatatctgcatatctgctgcctgtttttaatattcttatggatagtgttaaagtaaattaaaatggagactaggcctgaaagaaacagatgatatcagacctcataagtgacctaaaccttgcttggcttgcaaagcttaagtgaaacttaagctattccttgcaaatgcctatattaaaggaaaacagaacttaagcctgtccagttggaaatagccaacaaacttatgtatatatatttagtgactttctaatgggatagagcaaataaggcaattatagagctataaccagtcacatactgacttgctttacttttgtgaccttcctataaaagtccacccatcatgttccctctgtggagctcgtgaatgacttccagttagaagctgcccaatgcatgaattgttgttcgatcaaataaactctttaaaattttatcctgcctcagtttgtgttttaacagtaggttattctgataagattagaatatgaattgtatatctgtattttaattttttttagttttgtttcccctagattgctcatcagaatgtatttttatgtgtaagaaaagctatctgtaacaggatagtttactgcgaagttttatctatgcacatgtgctctggatgtgtaagttgatccaaccatcacaaaagagtcctttgtgtacaaaaaaaaaaaaaaaaaaaaagaattaaagcttttaaaggttaaaatttatttaatcaaatgagccttttcctaggaaaatagtgcccagattggttgtcaaatgcatgtaaaattcagctttttaaaactgattaattcacctattataaaaccaccgtgaactatcactgatcttttcttaattatatatagacaatgggaaggcttacaataaaaaagtttcgtttccttaaagagcagttttcacaaggaagtttcacatttctaagggatgccaaattaaaaaggataaaatacacttttgtttaaggtatccatacagaggaactgtatgattggagctggattctatcctcaaggttcttcagagcccagatactggacgtttcctgccgtccatcaatattgtggcttttggattcactcctgaaagggagagaccaatgggcgtacactacatgcaccctttgggaagatagaaaggataggggagtctcatctcttctgggaagcagcactgtccttggctgggcacctcagattttgtttgatatacaacagtacccccttatccacaggggatacaatcaaagacccccagtgggtgcctgaaatcacagatggtaccgaacctaattgccatcagtaggaacgaacacatttctgttcatgtcttcctttcacagatttaatgccttttccatcttaattaagcacttatcatgaactgtggttgaaacttttgcggtttgaggtgtgagagcaaaactagcatgaatttttctttttttcccaatttcatggatagaagatttattcttcctataggtgttgccacccttagcatatgacttctctttactaaatcaggaacttttgacttttcacttaaaagagatactttgggacttttccttggcatatccaaatttacagcatcactactcttctgtggggctatcgttaagtaagagaagagttacttaaacataagcactgccataccacaacagttgatctggtaacagagatagctactaagtatctaacaggtgagtggcatatacagccagaatatgctggacaaaggaaagattcccgctccagaagagacagagtgagagacaatgagatttcatcacactactcagaactgcttgcagttgaaaacttatgaattgtttatttctgggattttccatttaatatttttggaccatggttaaccaagggtaactgaaagcactgaatgggaaactgcagatcaggagggactactgtagaattcttttctctgaaaattcatctctcattactaattttcctgcccattttctttttcttcttttaatgtaattttgaaagtttttagagtaaaagtaaaatacttcatgatgggctttcaactaaaaaaaaatccacactttttataaatttggagtcggaaatttgggtgtgaaagctgctacatctcacatttctgtcttgctaacatatttaattatacatggcagagcaaaggaagttagttcagggtaaagctaattaagagaagtttctttataggtaccattagctgagtagtgacacacagctttggtgttgcaatattcttatatgtttcaccctgatcactaaagtaggcataaaaggttgaatgaggtcttgtcctcttacattttaaatgtaattcctagaaaagtagagaagccacacatatctcagtctcaagaaataaaggtgtttctctgtgatttactaaacattctgttctttgttggcatagagcacaaaaactgtattatatgcaaaattatcgagagattttgtgtgtgagtacatgcatgcatttatttctaagtcctgtagagtaacaatgaaatcttactgtctctgaaataaagttgagatgcattttaaagtagggcaggcagcctatactcagaaccagtgagtgcctggtacttgaaagaaacaaagtccttgttaagtgaagccgtatcctggagagttttgtatccaaacaataacctcaacattggttggttcaggggaaatagaatgagtgatcttaattaaaaattgcaatgctctacagtacaagtgtgaacggtacagagcagtcacccagccaaaggttgaagcacacaaattatgcttaattgagctccattattgttgagtttttattttattttaaaatatactaaagacagtaagagcttcaagagaggatattaaacaaccatcattgatcttgaatttagctggtggaatttgaaagaaacactgccctcctttctgaagaggaggacctctgttcccatagtaactaagtttcctggattcttggtgactgaagtgactaaatttgaactcaactttggcgaggtagcattgttctggtttttattatggatttttaaaaattctaaattttatctgtcttaaagagaagtctaaaaaactttcagtttctctttctgatctcacattctctaaggccattaattgaattttgctttgtttcattgttattttcatctgaagttctcatctgtaatcttttggtgattgttcttctagtatcactattcactgcattgcaattctaaaagataaaaacctctccccctctttctctttctattctataagcccactgattgttgtaaaaaaaaaaaaaaagtttaattcactctctcttcaagacttttacattgtgtgttcaagtcagctttttgctattctgaatataaagtcacttatagttgtttggaatgatttgggtcatttcaaagataattacaatcaaagcactgaatgcacacattgaacacaaaatagaattctttataccaagcaggttctagcacagagttggtatttaatgaacactggttgattgatgatgtgttgacaaggaggtgattttcttatggctacgtgaccactcaggggtaacaactaaaggaaaagttatctttgatgctacattgtttaatttatagtatactggtttgataggactttttttcctccccaaaatgagttctgagtttttgcctgtggcatggtttaaaaagagtctaccttcctcactcttctcaaaatcctggcctcatgtaggggtcacagacttaaatttgaaacagaaatatgagcccatatctgataggagcataggaattacttcctttctgcttcagaagtgtctataaggagggaaagcagataagctttctaactcagaaagtgatctgctttttagaagtggcaatattatgcacaagcgacatgtagttaaaattggttggaacttaatatccaagtaaagcacaaaggaaaacatattcctgaagcagtgaaggacatgccatcccagaatatgcgaattggtatgttgattatttcgagctgaaaacgttggaaaaagtataattgcagagggctaactgaccagtctttttctacacgtagcaagccataaagattcttttgggagggctgccttctccgtacaagggtaagagaatattccttatcagtggagactgtgattaggtgctgcaatgtgtctgagcaaataaacttcctgaaataatccttatcttctacttgttttacattcatatagctcctggtcactcccatagaaattattttccctagccagatccctttttatcctgtcatttcttcacaaatttatcgtggtgtttgtttgtttttgtctaaaacgtgtaaaagcatgttgctttggtcacttctttgaacttcactgtcttgtgaagattcccatgtatgtgtaaaattaataaaatgtgtacgcctttctttgttaatctgtgttgtgtcaatttggttcctagatcgggccaaagagcccacataagaactaaggaggggaataggggtgatcgttttctcccctacaatatacaatgtgtttatcaagtaaaaacaagtctgtcaagtctagaaacacagctgtctcctttcctgtggtagggggtaaaactgagagagagctgcccagagaggagaacgtgcaaagaccaaggagctgggtcaagcagtaagctgtgatgtgttagcttttattaaaaagaagcaatggggtcttaagcttcataatttctatactacaggggtaaataatattcattgtcacatgtgctcagaaagaaaaagtctaggaattatttgactttccacaactcccccatatggcaccttcgcaaatgcatggcatgtatgactggttaaatgcaccaaatctataattgtgattttatcagacacgggacttgtgtggtttgatatgtagatgtgtcatttttttctcttttattttgaaaattatcctgcacattctctttatgttattctcccttgaatcctgtaatgatgttagtgacaatggtctttatgagcctaggaattaaaaagatatgaagctttgcttggggagtgttattgacatgggtgaccttgattgttaagcagtgctttattacacataaaggtgaagggttttttttttttattcttatttaacactaattttccaaaatagccaactatggatttacagatgcttactttgtgccttcttggggagatggtgattgtgactggacatgctgaggaatgtggaggctgtcttagaaccataagtaagaacccccagatcattctggactaaatgtttccaaagtgatagaagtgaaagcagaaagtgctggcttactcgccccatgttgcatttctcgttgcttccatgtctcacctgaactttgtctttgttcctttcacacaccctcaaaactttacgcttctgcactaactggacttctgtgcaatgcagctgtagttattatatttaagcaggctttgctgctgccaacattggcggccctcagcctcaatctatactgagcgtagtgattgagatgttgttagttctcaggaagttataatttagttaaactcactcatttgcctaacacttattgaacacctattgtgtgccaggtattgtattgaagataaaggtacgatttagccatgatttctatacttctgggactcacccaccaaaaggcagcttttctgacagattgttgccacatttaactttgccttggtgcattcaaaaattcttttgaaatcctagaggaagtaacaattaaactgatccttgagcagaattagacttgagtgaggaagggaagaaagacatcctagcgagaggcaacagctggtataaaatttcagaggcaagaaaaagtgacctattcctgaaggaagtggctcagtgtgccttgcgtaattgtccatgtgggagagcgctggttgataaggctggaaaggatggcaggggcccaggtaatgacagaccttggaatgtgatggaacttggcattcgttaatttattcattgcacagatactgtttacatccatgtgatgtgttgcaggttaatagggggtacaatgccaaagaagataaacaagggctgtgccctcatggaattacattccaatagggaaaattgaagataagtaagtcaatacgtaaagacaatcattgcagtttgtgtaaaaaggagcaggaagaaaaaaatacgtaatgtaatagaaaatagcatggggtgggtgagggaaggcagagacctttgtagaaagcataggtagagaggactttctgaaggtgacacttagctgaaacttaacggatgagcaagagccagtcctggggagctgaaagaagagagctccaggtcaaaggagcagcaagtgctcaggtgtgagaggaagccagtgagcccagggtgcaggaggtgtgagggagagtggcccgaggtggacatggccatctgtacagtgccacatcacattatgcagggccttgcaggccaggtaatgtgcttggttattctccatgcattgaaaagtcattgaagcacagggtcagggttccctgctttacatttgtgtcaagcccttctggcggctgtatacagaaaggattagaatagggagcgggggccggcaggtcagttaagagcagatactgccctgttccccaggtaagaagcaatggtggtctggcctagggggtagactttgagacagaaagaagtgtacatattcagactctatttcagaaatagagtcaacaagaattagagctgttacatgttcctggcctgtgaaaacaggaccttagccatacatggcttatatataactacttttttgtccaaaggtcaagtggttcttggtgtcacacatgcagtaacaagagaacaaaattaaatgaaacaaggagatgttggtctctgttttaattttgtctgattgacatagatgatggtgtgtctccagcatgactctactgtttagctttagggattagaaaagaagtcatgatttaaccatatgtaatagaaataaattcactctggttttaagctaaactttgtcctcgagccccttctaccccatgacagagcaatcccagtgatttgtggtgtttttgatacaagaccagagaggggtttctggaatgatgggactggaaccactcggggtcagcgtagtgagggacaaaggctcctctgcctatgcctgcaggtggaaacaacttaggatttttaaaaaccagttttttaaaatgacacaattctggacttggccaagagtcaaagcaagtgattttgtttgtaccatgacaccagtgaagaatttaatggtttcaaaaaatcacaatttttttttttgaggcagagtcttgctctgttgcccaggatggagtacagtggcacaatctcagctcagtgcaacctccacctcccgggttcaagcgattctcttgtctcagcctcccgagtagctgggactacaggcgtccaccaccatgcctggctaattttttatttttagtagagacggggttttaccatattgacgggggtcaggctggtctcgaactcctgacctcaggtgatccaaacaacttggttggagaagatagcttttcagtcctatattgagactggtgagaacagactgtccagttgacctgattgtcagggtcagggcagcactcacagtgaagaaagggggttccagtgtgctactgtgaaaaactgtgactgttgttcctgataattgtttgaacagaattcaacacacaccacaaccatttacggagcacttctactgtgtgaagcatgaaagatgttcattcacgaaaaatactttaatatctgctgcagctcagacagtctgattgtgggtaaatcagccagagtttccgctttcatgaagcttacccagtatacatgctctatgacatatgatggagctgtgtcccaataaacttatcatgagttaaaatgcatttaatactcccagtaaaccattaaaaagtcaaaaaaatttgagatgaaccattgaagttagggaccatctgtatttggtgagatgaaaaaagtatgtaaatatgtcgggtgaggccagtgagataacttccagagtaaggagggcttacacctcattgggggcattcagaaagggatctggggagaaacagttacattataaaatgccagggtcacagtgttagaaggaccattagaggcatagagggtacaggttaacagcccagctctaaagtcctactgattgggtcagaatcccagctgagtgaccttggaaatgttctttgaccctcctgggcctcatctatgaaatgaggattattatagctccctcttaggtaattatgagaataatgtattccacatgcttagcacagttcctgacaccaaattagccattattatttttatcgtttgagcccatcccattccatttgtgaatcatttcagatgttaaaaattcttggttggtagacggataagttatcaagaggtaaacagagcaaagggagagcctttgagttaggaagactggcatgagcaaagactagtaggagacaagtatggggtatgttcaggcaacagcgcatgattactctttggctggagtgttgggttttaggcacagtgggagatggggtgaagaggcagaggcagttatactggagaggctttgagagccagtggtcaacagtcaaatctaagcactctactatatcattggcctatcctttccatattagaagttaggacaagtgtaagatcaggtaaacattggtgagctaacagaatacaactgacccttgaacatcacaggggttaggggtgctgactcccaggcagtcaaaagtctacatataacttttgactctcccaaaatttgactactgtttaccagaagccttactgataacacaatcagttaacacattttgtatgttgtatgtattatatactgttttcttacaataaagtttgctagagaaaagaaaatattagtaagaactaaagagcttctgcacagcaaaagaaactaccatcagagtgaacaggcaacctacaaaatgggagaaaatttttgcaatctattcatctgacaaagggctaatatccagaatctgcaatgaactcaaacaaatttacaagaaaaaaacaaacaaccccatcaaaaagtgggcaaaggatatgaacagacatttctcaaaagaagacatttatgcagccaaaaaacacatgaaaaaatgctcatcatcactggccatcagagaaatgcaaatcaaaaccacaatgagataccatgtcacaccagttagaatggcagtcattaaaaagtcaggaaacaacaggtgctggagaggatgtggagaaataggaacacttttacactgttggtgggactgtaaactagttcaaccattgtggaagtcagtgtggcgattcctcagggatctagaactagaaataccatttgacccagccatcccattactgggtatatacccaaaggattataaatcatgctgctataaagacacatgcacacgtatgtttattgcggcactattcacaatagcaaagacttggaaccaacccaaatgtccaacaaggatagactggattaagaaaacgtggcacatatacaccatggaatactatgcagccataaaaaataatcagttcatgtcctttgcagggacatggatgaaactggaaaccatcattctcagcaaactatggcaaggacaaaaaaaccaaacactgcatgttctcactcataggtgggaattgaacaatgagaacacatggacacaggaaggggaacatcacacaccggggcctgttgtggggtggggggcggggggagggatagcattaggagatatacctaatgctaaatgatgagttaatgggtgcagcacaccaacatggcacatgtatacatatgtaacaaacctgcacattgtgcacatgtaccctaaaacttaaagtataataataataaaattttaaaaaaaagaaaaaattaattggtagaattaagaaaagattaaaaaaagaaaatcagaaagaggaattataattactattaagtggaaatggatcattgtaaagacttttcatccttatcgtcttcacattaagtaggctgtaaaggaggaggaagaggaggggttggtcttgctgtctcagaggttgtgaaggtgaaagaaaatccatgtataagtgggctcacacagttcaaactcatgttgttcaaggtagacctgttttccctggagtctgtcttggaaaactgggactagatagctcccaaatgaacacagtatacctcaggggcagtgtgtcctctttgtagcactaccctgggctcctagggaaattcccagctcattttatttagacccatcatggtcaaggggtaaagctcccccttcctactattccatttaagctcctcatcttctgtttggaggggctggtagatttcccagaccataagatgttcaattacctgtaggggataaattgccagtccaagttgggtgtaataactggactaaagtttgggggtgctggccaatgggtgtccttacttgatatttgggtatgttttcacctggccacctggtactctacatggagaccctaattctttaaggactcgagttcttctattcctttttttttttttttttttaataataacagagatagggtctcactgtgttggccaggttggccttgaactcctagcctgaaggaatcctcctgccccagtctcccaaggtgctaggattataggcacaagccactgtgcctggccgtttccattccttttataccctaaagtcattccctcttgcatcctcctgccccttccccagcctgagcttttcctactctctggttcctaaaaccatttcctctgtaaacattccatgacactctctgctctgtatttagccagcagtttgtttttctttgtccatgcgtctgcctcagcttgaactggggagaaggaaaggaaacacacagaacaaaacagaaatctgccaatggaatgtttgtgagaaaggaaggtacagggaaaacaaactgatgaacagatgactctgaggacagtaggaggcagccaaatacctagtcagatagaggtgagtccccagtgaaatcccacctccgaaccaacagaaacagcctgaaggctgaaagaccagactgctggtcctggatgaaacctgcgacccagagtgagaacttgcgtttctgtttgcctgacctttcttggttgattctttctgaataatgccgttgaaccaatctaatgttgctttttcgagtactacctactgcctgcccctcccctattctgagcctataaaagccccagactcagacaaattgggtggactttcctgccttcagatagggggaccacccctgcatccccactctgctgaaagctgttttcatcactcaataaaactccctgactttttctttgattgtcagtgtatcctcattctgctggggcgcaggacaagaacttgggaactagtgtgcaagtcagactcggcctgagcgggctaagtgggcgggccatctcctatagcaagtagcatggccgagtgaggcctgggcagggtgtcactggccagaggtccctggcttgcaaagtgatcaagaaaaaatcctgtgtcaactccttcaaggtgtatatgttatttctggtctttttatgattcccttcttctcaaagccagccacctggggaggtgacgtggaagaatatacacagcccaggatgggaaacaggagctctgggatgtaagcctggctgtggtggtggctcagtaatattctggaccaagtcaataaacttttgctggattcagtttactgtcttttaaacaaggtggttgtaccagataggccaactagaatggtccttttacagaacgaacaggctgttgttttgccttttctcagcctgtgagagatctgatttatgtttgattctttaacttacaatgaggccgattatctagaaaaacatctgtattgaaatagctgagaaccggattcagtcccttcaccctcagctttccctctacatgcttggtcgtcttgtgaacaaatagcctttctcctgagcaagactcacatgtgatattgcagtttttaaatcaaatcagaaagaatatgcttcaaaaataatttcttaaggatttattcactgtttgcttagtgcaggggttatatttagtcgcattttaagctctccaattttctctgaaatgtacacgggagggaaatgagagaagcaattgaaaaacaatagaaaaagcacttagaataaatagagaaggtttggtaaaaccttccaatgtgtgggaacgatttcaagactttctacagatctttaaacattccacctgtttcatttgggtgttaaatggaatgtatgcactgctttcaaagctatctagaatcctagaagttttgcctccgaggtaataaatgtacaaaatgcatcgttgtgcctcttggctatcaacacgccctgcttcagacctttttgagataagtctttatctcagctttttacttcctgcttcataattgcccagctaagctaatgaagcccatttggtgttgtgagcattcaaagcgttcatttgcatgaaagctaccaccccttaattatgtaaaacagatattaaaaaataattccctgcttctgatcatgatcaagactctagggatgaatcctaaaattcaagtccgttcagagttgtccttttatgctcataatcatttgctaaacttaaaacgcttgggtgcttccttttgcagtgttgtctttttttttctctccctctctccttctctctctctcttcttctctctctctctctcccccaccccttgtgttcccttcccttccctccctcacctgcaaatggtggcacagtgccagcagcacccagctaccactctgtttgctgggtgacatgaatcctgcaagttaggaatcaaggtgtaggggaaaatgatgtggctttggcatcacttccctttcacaggtgtcttattacattttgacaggtgtctgacaggagatgctgtcagagctaggatttaaccttggaatgccaccttcaattaggttgtctcagaataggaaacagtgaaatggatctgagtggttgatgcctcagtattgttctatttaatttcatttctgtatcagatgtattgcctatgtgggcattttttttttccaggtgatacaaaaataggtgccggttgggccctgtcactaaaactgtgagtttcataagctgttcttgttgaggagtcagatgaagcagacctgtcatcccaaaatatattcagtggaaggcagatctggtattgtttagatgccttcacacttaatggggttttaatttctcataagtgtctaaactgctaacagcaatgaaatgcattagatatcatttgtcaaatataaaaaaatgtaacaaaatgaatgattgagaacttgagatggggaaaagtctgttagtgggtagattctcttagaaacttcactgggtaacactgtctctctgttttttaatcttcaatatttttttttaaattttggttttctggaattctgggggctctgagagcacatatagtcagctctgcctagcaaaataagataggattctcacaccttacacatacacagtttttcacaaatgagaggcactcacttgtatttgtggtagctggacctgaacagatttttaagtaaatttgaaacattgatgcctgtagtaggcaatatagaacagcagtccccaacctttaggacaccagggaccttgtttcatggaagacaattttcccacagacccggtggtggagggagtggtttcgggatgaaactgttccaccctatatcattaggcattaaattctcataaggagcccgcattctaaatccttcgcatgtgcagttcatagtagggttcttgctcctgtgagaaatgaatgctgctgctgatctgataggaagctaacctcaggcagtaatgcttgctcacccgccactcacctcctgctgtgtggcacggcggttggggatccctggatagaatacccccctcctaccaaagacctccatgtcgtaatccccagaaactgtggctgtgttaccttatatgcagtggggaattaaggttgcagatggaattgaggttgctcaatagctgatgttaaaataggaagattatcctagactgtccaggtgggctcagtgtaatctcaaggattcttagaagtggaggtgggaggcagaaaagcaggtcagagtgatgtgatgtgagatggtttcgtcccattattgctgactttaaagatgaaggaagaggccacgagccaaggaatgtagttggactctagaaactggaaaagaagcctctggaaaggaagtcacctctgcgcacaacttgattttagacctgcgtcaggctcaaggtgtcagctctgcccacacctggagacctgtgtcagacccccaacttccagaagagcaagataagaaagtggtgtggtttgaagccactaagtttgtgttaatctgttactgcagccataggaaactgatgcgttgccttgtaagtgaggcagtggttacctaattttcctgtcgaagttcatggtgtttgagcatgaagtggaatttttcttccatttggaattttttcttctctgtgacagagatgtctttggcaccaagctggttccagcttgaaatatgtttagtttgaacagatgcacaatctattttctcttttctgctccctgagattacatgaggaagttcattataatcagctattaagacccttagcactgatatttttgatttgcttacagagttcttttgctcacagtgaatgtcattattgttattatttttattattgtgctgttccagctagctcagatatcttggcccctcttgctggagctgggatgagtttaccagtgtttcactctcctttccatttcttccattcattaatcctctcttgctggcctcctagtgacttgttcttaccatacttacccttggtctgagatatatgtgtgaaataaaagcacctctgaatggaatcaatctagaaatgctatcatgtttcacatactttttagttaaaagccagaccttaatgtagacattgtaaaagcatgattttgaaaatctcttacattacctctaaagtactatgtagataaaatgttgcttcgtacttctaccatggccagcctgtccttgcaacagatcattatttcttaggttgagaaccagatgaagaagttgacttgtgttctgaggccatgtcatacaaagactgtagatctttatgtaatcaaaactcacatggtaccaagcagatataaccaaatcaatataaaccagttacaattatgaaacaagtacactgtataatcatttattctttcattcattttcattcatttaacagatgtgtgttcagtatctgcaacatactggcatagcttctgagaggggttactgttacttgattgcagatgtatctagagattattgtcgtactattccttaaaatgcctttatttgtcttctacgactcaccagtagtggagcctgtgggtagcagccaaccagggggagactcctgacttaattagcaggttggaggtactatggtgtatttgtctgttctcacattgctgtaaagaaatatctgagactgggtaatttataaagaaaagaggtttaattggctcacagttctgtatgccatacaggaagcatagcagcttcggcttctagggaggtctcagcaagcttccagtcatggcaaagggaaagggggagtgaggcatctcatgtggtgggagcaggagaagaaaggcaaggtgggaggtgccgcacacttttaaacagccagatctcatggtaacttactatcatgagaacagcaccaaggggatggtgcgaaaccattcgtgagaaaccgcccccatgatcaaatcacctctcaccgtgccccacttccaacattaaggattacaatcccacgtgaaatttgggcagggacacagattcaaaccatatcatacagtaaacccaccaaacatcccagtctcttctttataagagtggctccagagaagaatgttctgtgccagatcacatggatgacactctcttccttcctcaactccttgtcactccaggtgccaacaagtggcagccatctgttctctagccagcaagttctagaacctgaacagcgacatttcgcttacaactctagaaagtcttttactttcttgtcaataaaccaaagacccttcctctttataaatcttcttcaaagcatttttcttccttcagataacaaactgatatgtccttgcctggatgggctttaggagagttcagaaagagtgagctcttaagaataaaactgttcacctgcctgataatccctgcttcttaaggtttttgagtgtcaactctgtttcagttgaattacttgtagttgcaaaaatccccttacaaagtaagctactgtagagcagtgccttttccaaggagacgactgtctgcttctgcatcagtgagctgaggtcaagaggctaatgatctcctagttgtcagtctgaacattgtggttaatcggtcattatggatgagtatgatgagaaactgttttgaaatcatattcagtgtttcttacctgcttcaacttgctttgctccttgacttccttcacttccaccttgcggaccttaccccgaccccagagctcagacaacagatcttctttcacaggtgcacaggccctttgcttctaagaagtagtaacacttgtctccttagatgtatgtttcacccaaagtctgtgtggcctgactggtggcaggtacactctgaaccaagcatcaaagcagcccatcaaagacactcatgtcagttctcaactattcaagaccccagcatgtcactctagtggtagatagcagagaaagggttgtcaccttcacttcgttggtcattctaagaggctcccttcccttcaattacttgtgggtgtcagaagaagaaagagaacacaggagatatattatatgttgtggcacttcaaaggtgattactttttctacccatcaatcacgtaaagaaaatgctcccagctcacttgataatcctattttgcttttgaagaagggagactgactttctaccaaacaggccactgaattagtactgtcattaccgacttttgaactcattagggcttatttagtattcccaagctgtagaatggtctgaaaagtaatttctccagtgatgggtatgaagagaggaatgacagttttgcaggaaacaaattgtgaattgatccttcacattttcatactgggaaaccatgcagtctctttggttgggcacttagtgagaggttaagtttacttctggaattaattgtagcattgtcatgtagaccattgatgtacgtggggtggggggcagatgggagagatgatcagattcccattttgatagatgcagtcttggctccagatcaagaaggaacactcacttttttgtattaggaattaagaattcatatatgtaaagcatttagatcaatgcctggaacacagtaagcactacataagtgatggctgttgttattgttgttgttccattcattttaattcatatatattcgttattctgtcatctctaagtgggttctatggtttgaatatttgtgtctcctccaaattgcatgttaaaacttaatccccaattcaacaatattacgagatgttgccattgggaggtgatcacttgtttcctccgaaggagctgccaacaagttaccattttggaagcagaagactaccctcaccagaaacaagatgctaggaccttgatcttggatttcccagatctgtgagaaataattttctgttctttataaatcacccattgtcaggtattttgttagagcagcgctaatggtgtaagacagtgggtaagcctttcatccagcctataatggaatgggattatttttgttgctgttgaacttgtgttattatttaggttcataacccagaagcttgtatgggtgactagctggcctctttccgtccatttatccactcaaccatccatccatcatactgtatgcatatttattcatccaacatttgttgagcttcatctactctgtgctgtgtagtggatgtacaacaatggacagggaatcatggttccttcccccacagaactcatagtttattgaggataccaccaacaacaaaaaaaacccaaaaatatactaaaaagtttaataaagttagagtaagctgtggtaagtgctctaaagaaaataaatgtgtcatgaagtcaacaaatattaatcacttgtgtttgttaagacctctgattataggtcttcataagaagtgtgcttggagtgttccctccacatccaaaatcatctcctgtggaaccgtgtggaattatgcagctagctgtcaaacattccccaccaaacaagagactatgtctcataaatgatgatttctgcccttgccattagcgttggggtcctccatttctgtaagccccagcttccttttaacatcaagggctagattttggcaaactgaattggcctaaaagcatatacccttgaaattgttgccttacatagtctttcctaaccaagtctgggtattttttcatttaataaatatttattgagtacctaccatgtgtcaggcacttttctaggttctgggcataaaaaagcaaatggtatgcctagtactaattacctgccaagtttcttatccaattaattatgtttgttggacatatgcagcaaatgctaaactttgtttttctataactttggaagatgaattgtctttagaaagtaaataagaaggaattgagtagtgctagatctataaagtagggttgagcctaataactcccataagagagatccaagtacagtgtttatttatgcaaaaaaaggaatgttctcctctgattgtggaaactgaggagaccttgctgaagaagtcaggactcaagatgaatcatgaattagagttggggtttccatgacatgatgatgtaggatgatactcgggcatagggaatagcactttatgcatgaaggtacaggtttcttggaaagaagtaagcagcatggccgtgcaactagttagtgagaacagggaactagaatagaggtctcctgactaacatttaaatactctttccactctaccatgtggtgtttctaaggatcatgcttgatttgtttgtccctgtcaaggcacatgttgaaatttgatccccagtattggaggtggggcctggtgggaggtgttcggatcatgaaggcagatccgtcatgaatagattaatgcctgcctttgggggatgagttctccatctgttaattcccaagggaactaattgttgaaaagagactagcaccttgttgacatcttgcttcctctctgtcatgtgatctctccatacataagctcataagctccctttcatcttccaccatgagtgtaagcagccaggggccctcagcagatgcagatattcaatcttgaattttttagccattagaattgtgatccacataaatccttttatttataaattacacagcctcagtgacacctttgtagcgatacaaaatgaactaagacagaaaattagtacccagtggttgggggtaatgggcagcagttggaagagtttggaggtctcagaagaagaaaaaaagacaagggaaagtgttgaacttcttagagaatggctaagtggttgtgaccaaaatgctgatagaaatatagactgtaaaatccatgctgacaaggtctcagatgaaaatgaaaaacttactgggaactgtcacccttgttacatagtagcaaataacttggctgcatcgtgtccatgtcctagggctttgtggaaggtcgaacttaaaagtgatgagggtggggtatctggtggatgaaaatgctaggctgcaaagacctcagttagtggcatggctacttttaacaggttatgctgaattaaagcagcaaaggaaagatctaaaggtgtaatttataattaaaagcgaagcagagtgtaaaagtttggaaaatttgcagcctggccatttggtgggaaaggaaacattttcagaagaggaatccaatgctattgcccagtccagtgaaattgctaaagagattagcatgattaaaatggagccaggtgctagtagtcaagccaatgggaaaaaggcccttaaggcatttcaaagatcttcacaaccacccctcctatcataggcccagaggtgtagatggacagaatggttcaggtgacaggcctaaagtattgctgccctgggctgcctctggatgttgctccctgcatcccagctgctctggctccagccatggctcaaatggccccagatatagctcaggctccttctctggagggtgcaagccatgagccttgtcagtttttgcatgacgttacgtctgcaggcacccagaatgcaagggtggtggaggcttgatgactcatagatttcagaggattttagagatgactcatagatctctgaaagcatagacagagaccttccacagaggtgcagccaccacagaatctctatcagggttcctagtggagctatggaagtggagctaccaaagggactcccaaattatacagccaccagcagcagcagcagtgtgtaacctcaacctggaaaagccacaggcattcaactccaaccaaggaaagcagctacttgagctgcacccactgaagttataggggcagagctgcctgaggcattaggagcccaccccttgcagtacctaggatgtagggcatggaggcaaagaagattattttgtagctttaagatatcatgtctgcccggctaagtttcagacttgcacagggcctgttttctctttcttttggccaatttctcccttttggaatgggactgtttacccagtgcccatgaaaccattgtatgttgaaaacaaacatcttatttttgatcctataggctcatagctggaaagaaattaccttgggtcacagatgagactttggactttaaacttttgagttgattttgaaatgagttaagacttttgggactattgagatgaaacaattgtatttcacatgtgagaagtacatgggttttgggaatccaggagtggaatgctatggtttggatgtttgtcttctcaaaaccacatgttgaaacttgatccccaatgatgggaggtggggcctgggggaggtgtttgggtcaggagggcagatccttcatgaatagatcgatgcctgtcctttgggttaagcaagttctcactctattagtttccagaagagatggttgttaaaaagagcctggcatccccccacccttttactctctctcttgcttcctctctcaccatgtgatttgtgcatacaatggcttccatttgccttctgccatgagatgatgaagaagcctgaggccctcaccagatgcagatacccaatcttgaactttccagccatcagaatcatgagccaaataaacctcttttctttataaattataccacctcaggtatttcttcacaaaaacaaaaaatggactaagactgatcatatccctaattgcaaaatctcacaggaggagccaccttaaatgacactgactgtgtgtgagggactttccaaagagtttgtcacttatcctgccagcagcactgtagagccaacagaattgcctgtatacaaatgagacaactgaaactcaaaagataaacaacttgtccaaggtcatttgatatataaaccattttggcctgtagggcacaggagagaacacttagaagactttggagatgtatcttctgacctcccctataattgtgtttctggctattaaagaatactgtatatgaggttctgaaatgacaacaagtggcattcaacttgtagcaaactggtagaaactttctgggagaacattccggaggaaaaaaataacattagaatttgctttggctctgaagcactgcagataaaaatccctactgtcaggaaagcaatattaaacatcttggaatatatacacatgcatgagttagtgatgctttaatttatatatagatgcttcagtgaaaagggaagatataatgtaagtgtagaatgatgtcatatggaaaaaaacccaagcaaaggatgtagtagggcctttggaagaacctagacctcaaaaaatcagaggcacctggacagaatgatctgctcttggtaatcttctctctgcttgtctgtacccgtcttttatctctgaagatctttgtctctgtctagtttataaggaattcttcatcccttgagttaatacattgtaaaatctagaccactctcttttgttcctgttttgagtgtgtgaggaaggaattctggcccagctaggatcacttgcctaagtctgttgtcatattacacaaacatggcgacagggagccagtccctagaagtggcaaaccaattccagagaaggtgtttggcatataactcaaaagacagtgcctccaacatatagaagagaagacatggtctctgcctttggcctctagggagaatgataacagaagatgcctgaagtaacagcaagatcataacatctaacccatccctgattctaagagtgtgaaaaagaaaaaaaaaagtcactatcaatgtagaaagccaaggaagacttacaaatgccttgtttcattgaatttcaatttcagtctctttaaaacagctgttgtgattttatattcacagcagttttaaggaaattatgtagatgatatggtaggaaccaaacacctatatgctgagtctaaagtcctcagcgtgtttactcgtatcattttctctgtctcatctttttatattccctggcatagattttatcctccagcaataatgggatataatacccaataaatatattaataaagaaatgtgatgccatctctccttcatgtacattatttgttttaattacaattttagcttatataattatgtttttccacctagatcctaaacttcatgaattcctcacacatagcgtagggtctggcccaaagtggatgcctattatatgtgtagagtgaacgaatgagtgattgcttgacaatagcacctctgtaaagcttaggttggaactggggaaatggattaacaaaagtgtttcagcactgttaagactccaccttgatttattcctttttattgttttaacttacaatggtaatatttgcttactctaaataaattcaaagactacaaaagaatgtaaagcaaaaaatcagagtaatcttttcttcctactcctgattccattttccagaggttacccctctgaacctttcagtattatcctttctgagacttatgaatccttatacaacattatgtatgtacgtatagaggatcatattttgttaaaaaaagtgatattgctataaaaagtgtgattttttccccacttaatatgtggtggtcatctttcttgtcaatacataaacgtgccagttatcacagaagagaataccaaagggtgaatttgatgctgagacaatagcttaatagcactatagcagagcatggccttgttattattagcagctccctaaattttgtctgaggatgatttgagctggggttggcaaacaagagcctgcaggctaaatttggcccactatttgtttttgtaaataaagtttcactggaacacagccacacccatttgtttatatattatatatgactgctttaatgctgtaatggcagagttgagttgttgcaatagaggccatacatactgaaaagcataaaatatgtactctccagacattagagaaaaggtttgagggaccagtctatctctgtcttcttggcctagtcaggacccaatatcaaagaccgcacagtatgctcatggattggaagaatcagtatcattaatatggcaatgttgcccaaagcaatatacaggttcagtggtattcctatcaaactaccaatgtcatttttcacggaattagaaaagactattcacatggaaccaaaaaggagcccgagtagccaaagcaatcctaagcaaaaagaagacagccagaggtatcatgttatctgacttcaaactgtactataaggctacattaaccaaaacagcatggtactggcgtgaaaacagacaaagaccaatggaacagaataaaaaacccagaaataaaacctcacacctccaactgcctgatcttgacaaagtcaacaaattaagcaatggaaaaaggacaccctattgttattgctgggatagctggctaactatatgcacaagaaagaaactggacccctacctttcaccatatacaaaaattacctcaaaattgactaaatatttaaatgtaagaccttaaactataaaaatcctagaagaaaagttaggaaatgtgtttctggacaccagctgtgggatataatatatgacagagtcttcaaaagctgtgtcacatacacactatttcacaagtagggcctaatcaaagagcttgagcacagcaaaagaaactaccaacagagaaacagacaacctacaggatgggagaaaatatttgcaaactatgcatctgacaaaggtctaatacccagaatctatatggaacttcaacaattcaacaagcaaaaaacagccctattacaaagtggacaaaatacatgaacagacacttctcaaaacaacacatacaagcagcaaacaaacatgaaaaaatgctcaacctcactaatcatcagagaaatacaaatccaaaccacggtgagagaccatttcacaccattcagaatagttattaataaaaagccaaaaagacacagatgctggtgaaaccgtggagaaagggggatgcttatacactgttggtgggaatgtaaattagtttagcctctgtggaaagcagttgggaggtttttcagtgaacttaaaacagagctactgttcaacccagtaattccattactggatatatattcaaaagaaaagaaactgttccaccaaactgatacatctacctgtatgtttattgtagcactatttacaatagcaaagacatgaaatcaacttaggtgcccatcaatggtggattagataaaggaaatacggtacacatacacaatggaatactacatggccataaaaaaagaatgaaatcatgtctgttgcagcaccatgaatgcagctgcaggtcattatcctaagcaaattaacacaggaacagaaaaccaaatactacatgttctctcttataagtgagagttaaacagacaaacatggtacacatggacatgaaaatggcagccataaacactggggactagtgggagggaaggagggggtcaaggattgaaaaagagctattgggtactatgctcactacctgggtgatggtattaatcataccccaaacatgagcatcatgcaatatacctgtggaacaaacccacatgtgcaccccgaaatcaaaaataaaagttgaaattacaaaaacagataagtagacaatgcagtgaactcatcgagtttgtagaacaaaaaaaaaaatcacttaacgtttgtggttattgtacttcctctttcttttggcaagtttatcacaggtggattcaagtaactgaaaaagaaacaggaaaagatgcctggcatgcatggctgttattcctggcactctctctgattagggtcctgtatatatctctcaaaacacacacacatattcacacaccccacagatctataataaactaggggttttccttattatcggatagttaataaaccgcagcataattaaataagagcctacatttattattgtcattcagtaagcagcatatagttttggatttcctggttggagtccatccatagttaataattgggtaggatatgctggtatctcaatcaggatatgaatgattagccaatagttccttgaacagaaccttattactaatgaggagcagtagattgagttgagttttaagcaacttcaggatcactctgttttccttggtgggagaggagggagtgtgatacagagaagtaagtggatcaggctgcatggggttgtggtgacaaggctttgaagacatccatttatactgttggtcaagtaaacagtaaaatagcacccttggatttagggagtggtctgatcttaaattttaatatgcagaaccaccccccaaaacgtatataaaatgcaaatcttagagtcccagccacagacattcaggctcaccagacctgggtcagagcccaggaatctgcattttaaataaccccctcaggtgattctaatgggaacattcctgcaccaaacttggagaagcactgcattcctctaagatttgtctacctcattccatctccctgtctatttctctctctttgctttctcttgcctggtctctatcccttcctttcattacatgtcatgtaccttgatagagatagatgcctgcactcccatgtctagaggtacatggttgccaatgaatgcaaaactcagaaaggagactagaactctagccctctctttcactcctcctctttcctggcaaggtcacaagaacagtcatctatttcatccaagtgtttgcatctaacacaatcactgcattcagttttgagatttgtcatcaaacaaactgcacccttggtaagtaataccattgccctcctgagctgtggtgctattttcttcttttgcactcccttctttgtaaatgctcttacagggttgctaatcctcacctatttcttctttctcggggactttatgaattcaaacaggctcagacagactggcaatttcgtgcagtctccagccagacctgttttattcttcatgtcttagtaccttgctcagaatttattgtataaagaagtgcttagtaaatgtttggtgaataaagaatgaaaaaataatcagtgcctggatgaaatgaagcaaggcagagtaaatctcagaaaatttacttgcagctaagtagggctacgaggctctaatatgcaaatattttatttacttgaaactgggactgtccatctaaaactggttgatggctagactcctgatttgaaagctatttctattaaatctgaacttgtgtctggcagctttctcctatcctagcagaggttctcccacccccatacacaagcacaaccctgaatcgcaagcattgtcaaaggtagtgtattttctgttttttcagttttctaaaatcagagaaggtatttcaggaaagtgatttctaacagataggtactctatcaggtaaattttgatcctccttgaccttcattatttttcttttggctgtatccacattttgactgtcaagtaatgggacattacacggaaatagaaaagatatttttttctcctttcaaaattacttatttgtaaattaacccagattgagttttcaacattctacatcattaaagtaatgacagtaaatgatagtttataatatttacaacatattggagtagaaaaaaaatctatcattagcacatctttactgtacctttttaatagtgtaatatcatttgacattctgggcattatttttttcagatctgatgaacaataagaatgcacccccttccctgcattcattttctgctttttacttagaattttctgggctttggcaagcactgaagtttatggttgcgcaggaggttagtgtgagttggaggaaaaacttaaaacttgacaggtggtgaagtaaggaagagctcaccatttatttccttcccacgtatcttctttgttcatttgggattaatatttttttcaaaacaaagccaaacaaaaaaataagagaaggtagggttctcaggagtgggtggcatatgagtgactggaagcaaaaaggagagaggggaaaatggtgaagggacaaagagaagggcaggctgagagaaggagcagctggtgggagcagggagcagagggaggctgcttaaggaaaaactatttttaactgttctgagacctttttaaaagtaaaaaaaataacccctcttctcaagaagcccccacccacgattgctttcatcctcccactctggaaaaagtaatgttgttttcaattgtgtagaaacacattttagaaagtaaaaagccccatttaaaagcatgtgtgaggagcctgtgtttctgctcctgacctagaacagcattgtctctgcggcctgcacatcacctcgggtgcccccaaactgctttcagacagtaacgccctctaatgggttgttgtattttggatttaccaaaaacaagctatacttactgtgtgcttcaggggccagctcttgggttggagctttgcagcaccatcttgtttgtccaccccgatcaccctgtgaagtcatgttgtctctattttgcaaagggggagccgagcctcaatgaagacaagtcacttgttcaagaacactttatggtacagctgcaatattaagtcaagctccctctcttttcttttttaacttttaattctgaaataattttagagttgcaaaaaaaaaaagttgcaagcataatgtaaagaatccctctaccctcctccctcagatccccagatattaatactttacttacttccattatattttctctctctcacctatatatgagtgtgtgtaccatatatgttatatgtgtataaatgtatatataatttttagtgaaatatttgaaagcaagttacatgatgcctctttgctcctttagtgtatttaaacaagacattttcttagaaaaacatagtgtaattactgaaccaggaaattaaccttgatataaagctatttctggtctgcagaccttatggaaatgctgccattgtcttttatttgggtccaggatccattccaggatcacacattgtgtttagttgtcctgtcttttagtgttctttaatctcaaacaattccccagactttgtctttcatgaccttgacatttttgaaaagcacagcctattgcttttcagaatgtttcttaatttgagtttgtctgatgtggcatttcttcatggttagaatcagattttgcatattggccagaatcctacagaggtagtattatatccttcttagtgcattatatcaggagacactgatgctcctttctcccattcttggtattaactttgatcacttggttggtgtggtgtctaccaggtttctccattggaaaattgctatttttccttttgtaatcaataagtatcttataggaatatacttgtagaaaatgtagtatgttttttcttatacttttacccattctttttttgcattcactactactgattcttacctgaaacagttacttttgtgatgattgttaaatggtaactttctaatttaattactccttatttatgacttgaaattctgtaaggaagggcttttctcccccacctcccatttttttaaaaataaattttattttgtgtatttgaggtttaaagtatgatatgggatacatatatacaataagatggttactacataaagcaaatcaacgtctgttatctcagagttactttttttgtgaagagagcagctaaaatctacttatttaacaaaaaactctaattcaattttattgactgtagtcatcatattgtatattagatctctagacttgttcatcctacatgttactttgtatcctcccccccccctctatatatgtgtgtgtgtgtgtgtgtgtgtgtgtgtgtgtgtgtgtgtgtgaagtagaatcgtagattttttttaattctgtagtctctgggatattatcagtttttattttattttatgtccctatttagccaggggaatcccttcattctggttcatgtgttcttttgacctgtccccacaattttggtttttctttgtttttttttagccatttgtaactttgtggcaccacaggatattctaatctcatcttgttcctgtcctgtcccattaatggagccaaccacttctccaaggaggtctggttccttttttatttttattttttggagaatggtatttagaaaccaagatctggacatcaggtatgctaatttatagtggggtatcattgcttcagcctctctgtgagtagaggtaggcaatacatgcgtgtgtatttatatgcatgtgtacttatacacatactatatatatatttccatatctctcagtttatatattaaaaattatgaattcacagtgatgctttcaatcctgtaataagtcctccttaggctgctctctttctgcctgaaatatacttcagagtccttgaatgatttttaattgtcaatattttcagcaacacttctcttttgattgctttgtttgctatgaaaaaatatatttctgtctactaagttttatctatcttatttaatcagttatttcttataaatagattattagcacataaatacagtccaactctcctttgcccagaatagaagcttaactttttgccttaaattgttttcagttattgttttccttggatgggtaaaatgaatgttccttttacctttcagtcgtgtttcactttggtgattattttattttttgtgcttgccttaggaataaaacatagtgtttgggttttttttcttatttatcaggattgctttaatggtttcaatcatctttctttctttcctttttctcttcaaaattaattttaaaataattattgtagtaggaatcctcaacagctgagctgtaccatctcagagtatcattattatcactctgttaggtgacatgataataatcatttctaatctggtgtctcactacataaacatgcattgctaatcacaatatgcctctgatctcatttgtttaaaaaaagcagcagcagcagaagcagaagtagagaataagagaagaatccttctgaaagctcttagtttggccatattaccccacagtatggcttgtataaaacactttcactttcttgcacgaggaacataatgggaatccaggaagacaatatgaataattttataagttggctatttaaagagaaatacgcttttctgagtttctggcatatccaacttaatattacagtactggacctcattctgaatacttagaatatttacgacacttgatgtttggactttataaaaggtcacttgaaaatgaagtcactttcattttaaagtagaagaaagtggatgtggaaaagggaagagcttttaaggaaaaccatcatgtctgttctcctgtaaaaggtcttcatttccagtagtaattgtatttcttaatggctttcctaatattagatgattacgtcttgatgtatgaaagtatttcagctcagggattattgaggctcctctggcaaaatgactatcatacttacctggaacttttgtttcagcccaagtaacaattgcagatagacataaattagcaatatttactcagaactcacacgtagctgtttttcttgtttaataaggtacttttgcttacaaatgatagttaccagttaaagccatcttaagatcaaaaagggacatcattataaggattcagaggtatggcataaatcacaggggagggcataaactcagcttcatgagaatgccaggcctcaggaccaggacccaagaaaactattctctttagtatctctgtgtcttctataattgatggccatgtattatagagaataggagttctacaaggctgtccatggtaaacaaacaggatctttgattcctattagtctggggaatgttccataccacatccaccaggtctgagagcttcacggtgcacagtagactattaaagttactgagaagttgcatggaacagaaacctgcttaaccttctttaatctactgattcccaaactcatttgaccattgctttgagaaatatcattttaaacaaacactcgaataatatggaattaaatttaattggattcatggagttctattgtattattttttaaatgatacaatgagcacttgttaagtgactagttgaaggtcacagtatatttttgagcctcttggtctagtgctcttcccactggtgcttacattcgtggatcttggctgaggaactgtactgtcacagctattcactttgtgcccataccccatcaccctagcattttaaaggagctccccactttaaattgagtgattgattattccattggttctcctgacaggcagtctgctattttaaagatgacccagcagctctagtttaaaatgtgcctttatttcctgtgtgtgacgcatatatgttgagcagtttctggtcataggaactttggttccaaatcttattaaggtttttgtcattccagagggtgacattttaggggggctgaaactggctagcatgttagcctaatccttgaatccaggcaaaataaattttggttgagtttgctgtaacattcacccattcgttttcattgcttcatgtcttggatccagtgaaagggagacgtgtcaaatgttctgagaggctgtagattcacttggtaattaaaccaactagtgcaaatgtacaccagtgaaaacagtaaagtttcccagggtaagtcttctgggaaagtgagaaaagccaggcagaaaaagggtaattgaatatcagaaataaagagctgaggaaagtgttgggggagtaaacaccaagagaagaaactattgtaatttctgccaacaagaacatcatgcttttaaagtgcatgttgtttttttttcccctttggaacagttagcaggagtagcaaaaacagtaacaacgtgacctcagtgataatgtgtctctagtccatgaagctgagccaggtgttgtattaaatacctttgagacagaaactcatttctaaaatccagacatttgctgaatgaatgaatgaatgaatgaataagcaaattttaatttgtgtctgtctagggataagaacttttgatgctttgctcttcaaaggagtttaaaacataataagggagagaatacaggacatgaagttagagaagtggcatgggagaggtaataccatagaagtagaggaacaagagaaaatttccatccaacaaaggttggagaaaacttccaacctttgttccagtgaacaaaggtttaacatttgtatgggtgcatcagttaactgtttcataaaactcatgtgtaccaaactgtccccagtacttggtggattgaaataagagtcatttactctgattcttgtgtctgtgggccagcttggcttgttttgactatagggtgtgagttaagtccatgtgtctgtcaccctccaagacccagcaaaaaactaagacatctgcttctcatagtgaaagacaggaatgcacatgacattttaagcccctgctccattcacatgtcttaagccaaatcaagtctgatatcaaaggaatgtgacagtatactcctctcaggaataagaagtaaagagagagtgaatatttactgaacaacaatctaatttacttcagtgggaaatacagggttattttgtatatctggtgaacttgttaggaagtagcagtgtttatattgtaaaatcaagctggaggttgcaggacagaggctagaattccagctgagaataatattacaaagggcaggagtggagtgattttttccagtgagtcaagggccacaggttggtcaagggaaatgggcactgaaaatacctttccagaaacacttacttagtagggtgacttcggtagatcatgagaaaatagatttggtagaagattaaaagcaggaagctgattgtttggggctgaaaacgatgaggggttagagaagcaaggtaattaatatcagcgtctcttttgaagacataaagggcagaagagaaatagggttttgaaatgagagagagcaaacgtgagacgaacataagcatgtactatgagagcctatattcattaaagaaagattctggggctgtttgttgtcccaggataatgagtaataggtgatagatacagagctgtcatccttttctctcttttaatataagatattttgtaagatgataaggcaaggtgagtgagtaaggcaatccccttttccaatagttttgttatatacagacttaaaatgtgacatattaaaggggtcaggaaactcttgaatcttgagtcaaccatctctactacttaatatgctcaagggaccttatttttaaacatcatatgggggcacaatatttacctgtatggttagcaagcaacttgctaacacaatcagtcacttgaattgttaattaatgtttaattttctaattactcacacctgcagaaatttcccccaataggaaagaagacctagtttcaaacttggatgataggagttggggttttcttccatgaatatgtaagcagtcacaacttctgtgtattccctggcatttagtaacacagtgcagtcatctgttgaccatgagcctataacaggataagttgggtgtggggtccagagaaggagatggttgaatctctcccttcaaacagtgaatgctgtagctgggaaaagaaggcatacatagacaaaataatgaataattaagaaagtatcatatcctgataccatgaagcgctagcttcatagatactgtcaatagagaatagtacagaagatgtagagtggtatatgctgcaagggttaagagcacaggcttgggatccacactgcctatgtttaaatctttgatcgtccacttaccagctcagtgatgctgggcaagtccttgacttttttaggtttcagtctccatctatagaatgggaacaataacggtggctaccttgaagacttaattggaaagactaagttaatatatggaatgtgtaaaacagtgcccagcacataagtaagcatgcacaggctcttaaatattctaatttttattgttgttggtgatgttttgttgttgttgacgatgttttgttgttgttgacttggttggtttctttattttgttgttgatatggtatgggccacaaggtttagagaaggtgttgacagccatcgaactggacaccttgcgtgatgttcttaacattagcaccaaatcatctagaaggagtctttcctagccattctaaatataaagggctgtcttctcaaatgacaagctagggttaatgtatccgaagccactttgatttattcctcttaaagcaagagtgtttgtctctcttcaagcaactgcctgttgtcatcaggctaaggcttggtaacactcttggtttctcctcctctacctttgtctttccttcctacctcatgtccttcaagtctttattacctgtattagtctgttctcactctgttagtaaagacaaacctgagacttggtaaatcataaagggaagaggtttaacggactcacagttccacgtggctgaggaagcctcataatcatggtggaaggcaaaagagaagcaaaggaacgtcttacatggtggcaggcaagagggcttgtgtagaggggaactccgctttataaaaccatcagatctcattagacttattcactatcatgagaacagcatgggaaagaactgcccccatgggtcaattacctctcaccgggtccatctcataacatacgggaattatgggagctacaattcaagatgagatttgggtggggacattttattatcactggaaagtcagcttcggggagccccaggcttaagtctgggcagacaattctgtcccccttttgagcattttggctaactttgctgcaggtcataaacagatagacattcaacaagtcttattccagagatgctatacaagctgcatttagaagggtgaacagcagtcaggcatgccagacatggaaagagagtcattcatgtgaagacaaaaaaacacacagcctcagaagtgggggaaatgcttgttatagtacagaaatcaagaggccaatacagacacggttgcagtgcccggtagaaatatgatgcaagccacttgtgtaattttagtttttccggtagtcaccataaaaagtaaaagaaattaataatatgttgttaaaactcgatatatctaaaatagtatgatttcaacatataagctgtgtagaaaattatgaataggattctttcaccttctgtttcccttgtactaagtgtttgaaatctgggttgtattttacacttctggtacatctcagtttgggctagccacaattcaggtgctcaggagccgcatgtggctggtggctctactctattgatacagcaggactagggcatggcaagcaaggaagacagtgctagatgagggtggaaatatagagggaggatcctataagaaggggctttgctgactacggtaaagtttatgtgacctttgacagagatttctcttctaaagagagtgaaaaacagtttgttaaccataaactagtcttcatgtcatcaggtagatggacctgtaggaattgctgcctgttccctgcctaggcgccagcactcaagtggattttagccgaatcccttaaaggtaagacaaatgccatccaactattttgaagaaagatattaaggaatttacctaaaaggcgtacagaataaaactggggaggaaaacccaggcaacctcattgtaataaccttctgtctcatggactatatccttatattgaacagaggcaccctgcctcgcagtctgcaatgggcccactctgtttgcctgtgacctctaaacatagctgagcagttggaacccactggtggcatcccggaagcacctaaagaatgtgacaaaagctcccaaatctttgtttgtcttccctaatctacccagcaggggacagagggacaggtgtggattgggttcctgtagttgcttcaggtatcagataactcaaaaagtcttattaatgaaagctgtatcatcgtcatgatgcatgattggttcattttgtcattcaccagaagtctggcatgctgaggtgctcagtaaatattttttgaaagaaccagtagataaaggagcagctccttattgggcaccagcaatatatcaggcactgtcagaagccgtggcttcaatgatggtgatgtagagacagacatggtccacacctccatcatcatatcttgggattaactgcttcagaacacctggagagcttctgtaaatatgactgtcagatactcacctacctggtgagtcagttcttgagggtgagtttggacccagggcactccaggtgatcctgagccctgtgacttggatgtggccaccaagttggtcattgcaaagcagcatggtccacaccttgtgagggaatggaggcaatagggagcaataaaagcatgtaggggggatccctataccagcctggaatgccacctggaagaggtgacttctaagttgcaaactgaaggaccagcaaaacttgagcgagtaaagagcgaggagaaaagtgtgctagacagaagaaagtttttatatggtaaatttatattattttgctcctgcatcttagtcacccatctcttaggacaccgtagatgtgtgaaagtgcttggaaaggtgtaaacccctctaaggatggaaagtatgactgttttatggattctgtttgagggaacttcagttgattgatggctgagaaggatgaatatttgataggcagggaatgctctttatggcacagaatgtctttccaagaagaaactttactagagtcacagcaaacctctcagccacagtgcccaaaatgtcatagttagttgaattatttactatgaaaatgatggttaactgaaaatctctttaaaatatatgagtctcttttactgtcttggacaaaagcgctatacaagcaggggccttacctgtctctttgctggacctgcagcccctggagcagtgttttatgtaatgtatgtgctcaatgaatatatgttgtcagaatgtgtaattgacataggttacattagaaattttaactttaaaccatttgttttgtcatgaattgtaacaggttgggattaaactatacataacctgtaatttactgtcattttgaactatttggatattttttataatacacttaatacacaaacacttttcattatttaaaaaaaagtagttcaaattacaatatataaaatatgaaatttctctacttcctcgttcatcttcataggttattactgtcagatgactggtgtgtatctttccaagcactgtttcatgacttaatatccctttatgtacattatctagatttgattataaacaggatcatattatatttttctatgattacctttttgtctttcagagtatgttttggagctttgtccttaggatagcaattacaagtttactcattctttttattgacttaatagcatttcatgtatggaagtaccataatttatataaccacttctgtattttagtaatagagaaacagtcttacaataaacatccttgtacatatgttttatgtattttatgcatattaatgtaatcatttagcatagattcttaggaccgtctaattttttttaaaacaagaatagcatttctattcaatcattgccttgtttcttctttgcctgttttacttaaaaatcaggtagaggaaaaaattatgtttcattgagcatttttacttggcagctttttatttgagactttaattgtgaaatttagatgtgtatgaaatcaagtatttcctctaccaaaatgaacagtttttacttgtgattttggacatttagtagtttgtggcccttgtactagggagcactatgggcctaggataccccttgggtggggtttctaccacttccctgccatttgtatcatggtcctagtaatggaacacactgaacttgcacagtgcacaacccacacagccgtatggagccaacatgatgtctggagttttgcactgttgctatttttactcttttcttgttctcaagatctccagcttaaccctgggaacttaagatgcagagtcaagaccacttaaactgtgctgttaagaaaaatcacagttttatgcccctttgggaaagcaaacattttcagcttggaaatagacattgggacctgccaaaaaaatactttttgttttgttttgttttgttttttttgaggcagagtctcgctctgttgcccaggctggagtgcagtggtgcgatctcagctcactgcaacctctgcctcctggttcaaagaattctcctgcctcagcctccagagtagctggggttacaggtgtgtgccatcacacttggctaatttttgtttttttagtagagacggggtttcaccacgttgaccaggctggtctcaaactcctggcctcatatgatccacccaccttggcctcccaaagtgctgggattacaggtgtgagccaccatgctgggcccctgagtgatttgttgaatgaacaaatgaatggataagtgtgaaaccattgaaactacacttgaggctcctcaaaccattttagttattgcccttcaaactgttagtctgaacccaccatcactgttaggcagcgacaagaacgtgctggtttaattgggacattcatctagttaacaagctctcactgggtatttaatgatggaatggggctgtcgcgtggaaattcccagtataccacaacacttgagccttcatgtcgactaaaaagaaaaagtgatgagttgctgtagaagtgactttcgcaagatacaaggtcttcccagatcaatatccaccaaacaacaatggcaattgataagttaagctgtgatgagccagatagtacctgtgggctctcttgacaaatatgactagcaagccctttgcattgtacatcatgtaaggaggaaatcaaagatgaaatagagggttctttacttttcccagttaaatgagagattgtagttttgactgcccatttgttttagagtatctttctttaggggaaaggatatatattcattcatagtctgtttttctgctgtgtatgtgtgcttattcattcattcattcattcattcattcattcaatacatatttgtgaagagattgttgtatggctggcatagtgctaggtcttcagatagacttccatatctatttagcaaatgtatctataagtgccattttttagatatttcccctaatataaatatatttgctatctactttagcactgaattccctgagcaaaggaatagagactcatgttcatgaataggtttattttggagttgggagcttttagtccctgggtatcttcttatgctgtgcatttgggggacaggtgcatctattttctagtacttcatgagaatttttgatttgcctacctctgtgataggcactgagagtgactagcaaaacatgaagcgctgtgtcagtattcacaggtttaaaaattttgtctgtcaggcgcagtggctcacgcctgtaatcccagcactttgggaggccgaggtgggcggatcacaaggtcaggagatcgagaccacggtgaaaccccgtctctactaaaaatataaaaaattagccgggcatggtggtgggtgcctgttgttccagctactcgggaggctgaggcaggagaatggcgtgaacccgcgaggcggagcttgcagtgagccgagatcgtgcctctgcactccagcctgggtgacagagcaagactccatctcaaaaaaaaaaaaaaaaaaaaaaaaaaaaaaaaaaaaaaatttgtcagggattaaaatcaacctataacaaatagtcagtgaacagtacaaggtggcccatgattacgtgaccagaagttatgttggcgttttgagagggcgggaggtcattagggccagaacagtctaactctccatcttgttatccacatatttctaaacacatgctgtggacatgagaatataatgcatgcatggagatattgacaaagtgctctaattagcagaacattaataagtaaaaatcaactcactttcaataaaacctaatttcactaaaaatcactggaccagcctgggaatgggaagctcttagatatcgttgggaaattcattcggagtatcaagataaaaatgagaacaaggtgagaaatgaacttcaaaactaagcctgagtttgacttacattttaatttttttttaaataaaagagctctcacaacctggggatttccctccaacagctggtgagtaccctgtactatccccaccatcccatcctagactgtgtcaatgtccatggaaaaaggacttctatcattttctgggaatgagttcagctgcatgtaacagaaaccctgcctttaacagttgcttaaaaaaataggggtgtattttctttggtaacaagaagacctcctggaggtaggcagtgtcttagtgattgttttaatctgcctatttgcaagatggccaccctatttcctggaaccatgatcaaattcacggtaggaagaaagggagagaggtggcagcagcagtgttgctactggaaaatcatatgcttcccccgagtattccccagcagattttcactggcttcaagatggtctgagagaatgagtagttggccatgggatgggaacaggcaggagaaaaaggtgttaggaatgagcaatgggcaaactgagcagagtttcctgctacaggaagctctgtagatgtgtaattcagtgcaaaataaaaactcaatagactgacttgagaagcatcttgcctctaactgattaggtctcactttcttgctgtgtaaaacaaagggcttgcctaggggtagtctatattttcagaagttttcctgttatagcattccagaatttctcaggtacttttataatgattaagagctttatgatctcaaacacagcataattacagagagttactgggtcctaggtacttaatgtgcatgatcttattcaaccctcaccatgcctctgtgaagcaggcactattatgccatccattttacagatgaaagaagtaagtgcaggttaagcctctcggtgacatggttaaggtgacagttagatcatggccaggtcaggattcatcccaggagcatggctgatcccaaagacatttctttaagtactaagcattctagctcataaggttcctccacattctaatgctttctgtcttcttcaacctggctgtatgtgtaatacgcatattttcatgattctcatttttccaaacttcctagttttggtctggaaggtcttctctttttgtgagttgattgctctttgcccaatttatgtcctaaagaacagtctcagggcaaggcatgagacttgaatcaggaatgaatacagtgagtcatagtgcctttgaggccagctgtgtttatgtttgaatgccacctcccacttgctagatgtagatgtgtgactttgagtagggtaagtgttatatctttaagtgtcaatttcttcatatgcaatgggaagattatgatattaaccaatggcattttaaatgagaagtaaatgagataatacttgcgaagtgcctaacacagcatgtgtcagtgtattagagagttgataactgtgaaaatggttaaggtgaaagggatgtaaatgaaaatacaaacaaaactggattatttggcagatcctaaatactctttgaccagtatagtctcacattgttctccttcattctcagtgtgcttgtgttgtgtgtatgtgcacatgcaaactttgcttttcctcatgtctgctttgtgagctagagtcagctatagctatgacagctctagagctgctcacatggtaggtaggttctgtctgtccctgtccctcatcattcagggtgtggatgatacaatgactgtttactatgcggtcaaaattctagaagtactgtctgtagcatggaaacagagtcttctctgcatattttcaaatgcaagatagagatggcagtggtggacaaggtatgagggtggtttggttgggggtggggtgcatcagttatactgtgttctttcattgcagctaaaaatttcaaaaataccacccatttcggagttcagtgaagtaaattctgagaatccaaacatcaaataagagttataaacaacatagttttattattactaggtaattattttacttttatgtttcattaatattatttatttaaatcaaattagccatacctataacttcaggcaggaaggaaaggtataagaggaaaatgaaaactttcctttccttctcttctctgacatgctggcctcttgtcctccaaatattaccattgtgaagtttcttctgtagcttttcagaaaaagaaattatgcacatgttgacatctaaacaaaatgacacggagcctttaaaatctttacttaaatggcatattatatacattcttcacacttagcttgtttcaaagcatagtatatcttgaagagcagacctacctcattattcttaatagctgtacatattgttttgtattgataaatcaaaacgcgtttaacccaatggatggtatatgggttttcttctccatttttttgtttgtttttatgggcaatactacaaaggacattcttgcacaaattctggcatactatttggaagtatatctgtagggcaaattcttagcaatgcatttgctgggttaaagggtttgtgaatttgccattttgctaagagattgccaaatgctggatatgcaagaaatgttctctctcaacaaccagacagaaggaaaatctcttcattcctttcttttaatttaatttgcttatctttcaatggccttctaaaaaaattgaatggcatgttttttaggtagattttgtttggcagtcactctgggcctctgcttttattaagggagggaaggcagatgagctgtggtaaacatggataagtcagtgttctggcttcctcaaccaatgtgaatttggatggactattttttctagttaaagaaatctccatatgctatggtgatgtatctggagtatatcagtttcttgaaacacaagatgatttttattttgcttatattcagtctcatttagtaactgtcaaaaaatttaccgtattgccagaaagttgatcttgtagaccagatgtcagtcgggaccttgttgctcaatggagatctaactataatgtactcaaactaccaattccacagttcatgagaagttaaagttctctccaccttctctgtgaattttgtcttcctctggtttctctgtccaagtgtctgttttgccctacttaacaggatgtgcaatttgtttgcatgtatctgtaacagtcttctccccaggcattattttaatttagttgtgaactgggagatattgtgaagcggtctcattgtggaacatttcttgctcctcagttgactcttctcctcctccatcccttttcacttcttctctcctactggaaaagaaggtttgcctttttctgcaaggcctttatggctattaacatctattccctccagtctttaactctgagatggtttaatgaacatgactctcctgcaaattctatatgttttcctgaagattctttctcaaaccaaaaaaacaaaactcctccatatccattataatttcatccaaaaattcatgttaggtcatctcccttacaaagaacatttctcaaacagcgtttctgtttgtttttgtttctgttttaattagctggcattctggtgtaaggattaacagaagaatgccttcttaggataaatccagcacttcagtagaagaaagatcgtgatctttgggttgggagacctggggttaaattcaggccctaccatttactcattgtgtaatacaagcaacttaagttttgaagctttattttcttcactagaggagataattcttaatggattgttttaaatgttggaaatgaaaatattaagcatccagcacagtacttggaatgtaggaggtgcttagaaaataagagtgttacgacagttactctcaaccaccctcattgtcattatcattgaatcctgagctgtgtgttttcttcactccacagcatagaatacatttccactctcattcattgtttcagcatctcctcatctcaactccatagtaaggtacctcagaagaaggccatgtctaattttgtacttggttgttgagcacacattaggtactcaatcaatgcttattgattggtattttattgattggtgatcttttggaggtctgaaaattcatctcctttctacctttctggtaataacctaaggaaacagaaattcatgatgttagaaagaatttcatttcttccccagctgccttattttgagtcaggtctctgtactctgacatgagacatatcttcattttttccccttctagcagtaagtcagtctttctcatttcttgctcttttccatgttgttttgccaatttctctttcttttgctttctctcctacatgtgaattctctcctgttcttctggctgaaattcatctctcgtgtcataaatgcccttccttctgtatgattcccttgtctgctttcctttcatatgatctattcaccttatttgaaagaaaatgtcatttgtttcctagcatccgatctgaataacagtgaaatgtttgtttaaaattaatgttttgagcaaagaaccctctctgtttacttgacttgcaatattttaatatttaacactctatgatgtaaaacttgtggaagaaaaatatcctgctgtgatctggttgcctaacaatttacattcagctgcaatattttatttgctataattactcactgacaaaacagggaatcgaaatgcaaaaatacaaaatgctctcagtttgcattttattttggaatgtgaaaaacccttggttcttgagggaaagagcataaaaaaggaaagctagcttagtcagatatccatctctacaaacagactcttcagcagtaagacgcaaaccagagaggaaactgtagggcttctggagggagttttttaaagaggtcgtatgttgtggactcaaggttggagggcagggcctcgggccatcacattccatctcttactccagagtctcactgtgatttttacacaggtcctttcgctgtgtggcacctatggatctgctctcttaaaccattgaaatttattagatgaaaggtaggaatccactgggctcttgttagaaaacgtcctactctaacactctttccccatcctattatttgcactcttgaaagtgacaggtttcattgggattgtgggtctgaatggagcatgacagccaacacctaggcattgtgtggaccaaccaatagctccttgcttgatttccaccactataaacaaagtccttcctggattcagagatagaaactctaatatatctagatcttagctccttcacacatttaccccaccttcatttgcagtttgaaaagtgaaaagtttttgttcctgaaattctgaataagaatgctacagtgcatttttccaagaagtaattaataagagaaatcaaaacaagatttttccctctgtgattaaatctaactggtacactccagtagaaaacaaaccaaaaccattccattgattttggtatcacactgggggagaaaagtcattatacttttttaaaatctggaaatgcctaagacacccatgtattgagttcttataattgcaaatctcatttttctcctactaagctgctttcttcccaaatgtgccacagttttcatgtaacttattcaaagtaggtagtatacttttaggagaaactgcagaaccatttcccaggaacagttaatatgcattttaatatttctgacacataaagtagttaatacaaaggattaatcattacataaaccatgtgatgggaggatttggagaaagttcttagaaataaagaactttgttatgtgatgcatatttaaaaagatagttttctccaagcaatcaataacacaggatttagtgatccttagttagtcccccagtattgattctacggtctaaattcattataatttggttttgagatagctagaaagttgattcttgagtcaaagattttctttctttacagagaaactttttgagtgtgtaacatgaggatggaattcagaaaacatttgggtttttttttttaacaccaattataccttccattatgttctttatttttgtttatggtttaagaagttatagaggctccccagggttaataacgtcactttcctgttgctgtgagtctggcaatatgaagaaattggatgactaccatttttcccccatgtatctgggtatgttgtttatcaaagcaaaaggaaaacaaaacaaaacaaaaaacaacaactcatggagcacggttaatgcttataagttcaaattaccctctatggatgacacatgatgtgatcaccccatgaagacctgttgaagtcaaaccattgtcgatttgaagaatagctagtaaagttttataaggaaaaggtaaacttattgcaaagctacaaggagtcttgtactagaaggggagacccaacaagaatggggggagctctaggcagccctcattcatgaacctcgtaggcacagaaaacctctgctctttttgttgggggcaatgaatatttgggttactggcggctaatcgatatgggcctgcagcaacctcagttcttgcctcctgagaaagaattcagctgaggggcataaggcaggaaaagagactgagacaagttttagagcaggagtggaagtttattaaaaagctttagcacaggaaagaaaggaaagtatatctggaagagacccaagcaggcactgtgaaggtcacatgtaacgtttgaccttttgacgtgggttttatatgttgttgtacttctgggccttgtgtcccttttcccatggttcttctcttaaggtgggccacccacatgtgtgtggcctgctaacatgtgggaggtgagcatgtgagtgtgtttaagaagttgtatgtatgcccacctgaggctttcttcccttttccagtggaatgccccagaaaaccatattctgccattttgtctcttaatgcgcatgcttgtgctcactcgcccaactcctgaaaactgctgattaccagttacaggtgtttcctatcaatataggaagacggtctttccctggtgctggctgtgacaaattattattttaaagagagttaacaaccacctgaccatcacctgatggtagcgtggctttcctggtgggggtgttgggagggccctctcctgccccatcacgcctgactacctacctactgtaacattttcttcgttttagttgccttgattttcttactcactcggttcctatgtttttagaagatcaacctgtatttgaccatcatggcctctgaataccatgactctctgcccaagcttttgccacttggtctgtgtttcccaattcacatttcccagaacaattaatattttgttgtattttatccaacatttcgatgtctcattgtgaggggatttttacaaatcgatcatgttatttatcttttttggccctgaaaacatcctcataatctttcttaacacagtgttgctagctgtcactatcagtggatttgagttggcatgcctggagtagatcatcttttgtgtcactttacagctagtgggagtcaattctaagaaagagctttggaatcagggcagatgtggcatctttcaaagggaaaagcagggaacatttttgtgtgatggcaaactacacataacataaaatttagcatgttaaccatttctaactgtgtcattcagtggtactgagtacattcacaatgttgtgcagtcatcacactatccaactccagaagtttctgtcatctcaaatagaaactctgtacacggtcagcacggtggctcacgcctgtaatcccaacagtgtgggaggctgaggcgggcagatcatgaggtcaagagatccagaccatcctgcccaacatggtgaaaccccatctctactaaaaatacaaaaattagctgggcgtgtaatcccagctactcaggaggctgaggcaggagaattgcttgaacccaggaggcggagattgcagtgagccgagatcgagtcgagccactgcactccagcctggtgacagagcgagactctgtctcaaaaaaaaaaaaaaaaaaaaaaaaaaaaccaactctgtactcattatacaataactccctattccccggactactttctccctcccccagcccctggtaatctgtgttctacttttctgtctctgtaagcttgcctattctaggtacctcacagaagtggaattgttaccaaaacactaggggttcggtctaggtcctgctgtttgccgtgcagaaaaccagtcactgagatgatgagtattgccaagaagaagggagttcagtctcaaatccatttccctgaccaaaaccagactatgtaaaaccaggggtttatatagccaggaagaaatgtaataatgtataagaaaacaggaactagggagaggcaaggaagcaatcctgagaatgaggggtccagcatctcattgtcaaaatgtggtgatctggtgagtttcagtttgccaatacttttttttttttttcgagaggcctgaaggtcatttcctgaggaaggaactcagttaaaacaaatataaacttcaagcattaagaccacaaaggtcaatttctacgtctatccaaaaaactatctatgggattattgggttggtttcagaatcacaatatcatcctttgtgactggcttatttcacttagcttatgttttcaaggttcattcatgttgtaacgtgtcagaatttcattttcatggctgagtaatattccattgtatggacctaccacatatttatccagaggatagcattttaaactgggcctctaagcagagaggcatggaagtgtttgttggtggcacatcaaagctctgaagcaacagaccaggcagggttcacattccagattttactagtattccacatattagtatatgacttttgggatttcatttaactcccctagtctacttctttggcgtctgtcatatggacataataataccactcaaagttttgtggtaaggtttatatgaaataatgcataggatgtacctggcttggcttctagtaggtgttcacaaagtgaatcccacttccccctttatcacccattctcccacccccagaagttccacccaggacaaagaatgaagacatgcataatagtggatgtgttcctcttggagtgtgggagaggcagaaaaaagcatcccaagttcccagagcttggatttgagaactttcaggcagggatggcaagatccccagaccaggaagagtggcctctgggaccattaccgctccatctgttctgtgaataaaggtagctggctttggggatctgattgatgtcatgaaaggaaggaaaacatgtttttctgtctgctctgctgaaaacaccttatctaggataaaagtattggcccctctttcaaactgcttttgctgtttcccatgaagaaaacctttttcattttgataaaaagcaatttctgttttcctgccaagccagcaaaaactcttttgagaaatgcttctgctttcctggtatcagggtgtaaaatctgcatgacatggagaccggtggtggcatcatttcagcagctggcaagggagttggctggaagaacaacagagcaaagcacacaccctcccgggtaatgcacttgaatcaatcaaaagcgtatacttggaatctaactgctgatggtttgggtacatctaaacttgtaacacaataaggagtgcagaagagtttctcttacaaaacttactgcaaacaatagaatcgggacagggtggtgcaaatagcaaaacaaaaggagcattttattcttcccccctccccaatatattaaatggttactctcaggcagaaaaccttttagttccaaataaatctcaagtaatagaaccagaagcaaaccaagctttctaatctacaccaaaatttctgggagaaatcttctacagaatccattccctctgtgtgtctcttaagagctgtagccaagagaaacttaaagaaataaggcagaaatattgtacactgaacccctgccctgccaaacctgactcaggaagccctatgtatggaaactgcataatgctcttggcatttgcagagctgtgctctcagataccttccagaagaatgacagtgtgtgaagggggcaggtcatgactattttttaaaggacgtaaatgagacttggttgtgcctgaagcacttccacaacttaaagctggtatttcacgtgtctggacattatccaaaatattcatcttggccagctgacaggaatgtttactgagtccttaggagccacttgtttggtaccttcgaagctgcctagaaagagtttgtgttgcgtgggagtggggagtgagtgtaagctgcagcatcagctccgagttagccttcccgttcctctaagtgctagttgtgtgactgttggcaagtcatttaacctctctgagctaaagtttgcatccctataaaatggtgaaaaatctggcccttcaacatgttggtttccaggattgaatggaatcaaaaagctttctctaaatgccttgtacactggttgccacgtggccagtgcctagaaaatgttggtttcctctcttctttcttcattgtttgcaatacagtttttcttggtgcaagtgctaaagcaattaagctctgaactgcaccatctttatgacacagaaattggctgagagcctcagaaataaatctgagaattggaaaaaaaaaaaaaaagaaagtccatcaccatacatttgtcagttggcatctccttgctttttctagttagagtctttcatagtagagtgcttatttctttttctcatccatgtatgtaggacagtgtttgacaggcatttttatgtgtgtggtagtatggggaaagtgacaaaaagaggcccactctagatgtcacttccctgtactgcaagctggagttgacaatgaaatccctcctgaagaaccccagtggtgttttggagcatctcagcatcaagaggagggagaggcactgagcagtcaagggtacccttcttgccatgtgagaaaagtatatgaggtgtagcaaaaagataggaggccacgctttggaatgggggtagtttatttctttttagttctgtgaaaaatcatataatgacagggtattttttttcctgtgttgggcaactgtcctctctagacaaacacgcaacccacacacagatcagtgggagtttggagtatacagcaaaggtagccattcccacttcattaatttcttaatgtaaaatgtaaacaaaaataaaacacaaatttctcaccagtgatagtgatgaaatgctattattattgcggaggctaaggatgatatttaaacatttctacccaaaaatttagtgtagaaagagatctgaaggtataaacaacagtaaccaccaccaccaacacaacaaagaaaatgatgtagaatttgttgattcttttcctgtgcttaacccagcacctaacatctagtagttctctatctaataaatgctgtgttgggtattattaataagcagatcaggcagaagtgttgccatgttctcagtattatctatagggaaaataatgcgctgctgttaagaggctgaaagaacttcctagctccatcattatgatagagttctggataatttgaaaaccctggtgctcattgacaagtgtgtgcttgggttgggatgggagtggtacatcagagcaatgccacttcattggcaacaggatcacagggtgcatttacatttgtcagtagaagctatgttttgttttgttttgtttttctaatctgacctcaacgctttcatttatctcacacacataaagtgttttccaggttctgtattagaagtttttaactttgtgcttgaaaatagttttacactctgtaaccgtttttctttcttttgctctcacctgtccttatttctttccagtaattgtttgcaaacttatcatttagttctctgaagaaatttgaatctaatccaaaactttaaaaaattctatgattaaaacaggaaaataattcatatgtaaagttaaactgatttttttcctatcatagctcatatttagaaatgtttttgatgattgagcaaaattattaaatttgttctcctctcaataaatatgtgtgatttttcttttccagagtaatcacttggaagaatacaatatatatggcttctgatttacatttgaagcatactctgagtagggttgtggatagatttataagcatgttgaaagaattcgcatatgtctgtctgtatatttttaagaaaatgttgtttctctattgaacgtttggagttttttaatcctgtgaacatcatgtgaggttatatgaggaaaggactctttgaaggtggtaaagtgatgagatgaagtagtaagaaatggagaggaccacaaggaggcacagccaaagtgccttaggtatgactcagatatgacttgcaggaaagcaaaaaagcgggggtgggggatgtcttcaaatgatagactcaatttctttccatcttttggtatctcttaagagatttttttataaggcattaatgttgatagagttctttcatccttgtgacctttcctttccaacttgtgtggctctttctctctgaaggcaatgtgttttgccatagccagttcacatgacgaacaataacatgtctaggcaaaatgcatgtcttggaagcaccagagaaaatactaacttaagatttccattatatgataaaaatttgttgagtatctcgtatgtgacagacattttgctaagggctagggacacaaagatgcaaaaggcagaagtctctgacataatggtgagggcaacagtttagaagtgaaagaataaaatgtttatggtctgacatatatatatgtatctagagagaaaataattgggatagcctactttaggtggtgtggttagggaaggcctctctatggaggtgacatctaaactggtatttgaaagaagagaagaaaccaaccacgctaagaaagagggaaaacacattctaaatggaaagaagatacagaagccaaggtgctaagatgggatggagcttggcattcttattctcattctcactggtcagcatgcctgaagcatggggaacaatgcagagctcacactaagatgaaagccagagaaaatataatactgaagactctattttaagtgtaattttatattttaagtgctttgggctggcaggtttaactgccataaatttgacttcctgataaataacacatactttgttagtgtaagttacattgcaaatattacgcgggacatacttatactaagaaaaaattatatgtgtaatatatacttatatattttatatactatttatattatatataatatatatttatatacactatgtatatatattttagacatactttttcccatcccatcctagatgggatgcccctggtggctttaaatgtggcagtacagtgatctgattcctgtttgtaaaagatcaggtggtttggtttcctgtctggctgctactttctgattcccaggaaaaggcaggagcactctagccagttcacaatgtttatgacagatcgatttctaggattccctcttttccctcctactgttttcagatgagctgcctactggtaaaagaaaaactgtagacaagtttaatttaacagagtttgaccaaagagcagtcaactaatcgggcagccctcagaatgagttaccaagaactacatttgccaaagattctaaggactctaggattccctttagtacatgacctgtgttggtggctagggattctagagtttgagtctagtttttcagggtgtactcgtgataggcaaagctgccccaggatgccattcgttctattgctgctctgattcctgctagaattaatgctgttgcttgtttatttctggtgttcttggttcttatgggattatagactgtgacccctagagaagcaagagtggccatcctacattcacctctgttccaagttttttatatacaagggaaagccactcctaaaaacaagtggctcatggggtagtcaagagtgaatatggggtatgacttttccccattaatggccacaaacaaaaattagtccagttggggtgcaaatagaggctccacaacatctgatatctatccattgctgccaaattgggtctgtagagatattcttgccctgttccaatggagatacccaaccaatctttgtttcacagagtgggtcagtactcctaccttcccagattaggcagttgttttgtttgtttgttttatttttttcctgtatgttgttatctgagagaagtcaccatatatggtttgtttccttgctcacaagtagaatcctgtatacactgttacagccttggggacttggcagcttagagttggatcaaagcattgaagggaaacctccacttttgtgtcattaatacacagtgggtgcaaaatatagaatcattaatgcactacagatatagatactcagatttccaggttcagttaatagcagttgagggtgaggggttcaggtagaatctattaagtgctggagagataaagtggcatggcaccagtggtgggcatatcttacggaaatgtacttccactctgtccctgttctaggtagtctttgatttgatctggtgtccgagccctgcctcctcagtcaaatcctgcctcctccttaagttatgtctaggtgttcaccttatttggtcatggtctgatcagttggcagcctgtgattggctgaagctcagctgctgttacaaaaaaaaaaaaaaaaaaagcatcctaaattaggctttcggtgtgtttaatagactaagttaggttaggctgcagttccttaggtagggactcaaattacggagacagcctcaggctaaatttaatttttttaacactatgcatttttgtgagtctccgcctaaacatgactcctgctgagaggcccacccttcccctacctcaaaggccccattaggtaccctcctgttatgcagaccagaagctccctacttccttactttagcagagcattgatgccccgtgttataattacttctcctttgctgtcccctctagaataggaaccctctgaggacacaaactgtggcctttcccttgattatcttccatgtagcccaggacctgaaacagtggacaagctcaatgactgttgattgaatgcatgaattaatggaggcctctttagagtaatcccctgggccttacaccacattctcttctctgagtctgatttctggaatatcacttgctaaggggcgtatttattgagcactcccagctctcaggtgccatgaaaaatcttggagatgcctggatctaggtctctgtccgtaaggagctcataaactagttgagaatatgagataacccagaaaaagatggtgagcaaagccatgaaaaatacaatgaagtttttgaatagagagtagaatctgtgagactcggggatcctgcgcctggattctgtggactgcataaggatacatgaaagggcttgcagtagaggtctgggaacagcctgaaattatatatatagtattttatgcacatacattctttcagtaagaaagtcttcagttttgttcagattctcaaatggcaagtacctaagcctaggatgttggcaaccatctgctgctctaagtgctatagggcttcatgatggactgaagatccaaatatggaaggcgaaactataaaccaagagtagaaaagatgaaatttcttcacaatttcttactagggtagaatttcttgaaataataaaggtaaaatttaaggaatttaattataattaaagatttgtgttcaatgaaataaactatgggaaaaatgaacaaagtacaagctaagaaaatattggagatacgtataatagctgaaaaattacgtctaacagtggacaagagatttatactgggaatatatctttttacttctactaattggtaaataaaagatgtgaattcaaaatttttaataagcaaagatataaatgggcagtttacgaaaggggaactttgaatggctaatatgtacactttcagtattctgagacatgaatatttaaataagaaacactgctctataaccaccaagttgaccaaaagcaacaagaaagatcataataagtattagtgaggatgcataaaaacaggaatttggagggttgtttgatatggtaaagaattagaaacaatctatttgcctgctgataagagaatgaagtaaaattattatttatgcttattatagaatacttgtagtagttagaggaattaaaacctagatcacccctgtctggtagaagtataatgtgaaccacatgtgtaatttaaagatttttagtagccacacaaaaaagtaccaagaaaatttatttttacttttttaaatttaaagaattaggtgatcatgttaatgctgtattttatttaatatatgtaaagtagtatttcagtatatcatcaacataaaacttactgatatgttttacattcctattttgtactattttcagtatctgatgtgtattttatagtacatcttaaatcagaggctaaattttcattggaactgattgattcatatttaagttttataaaatgtacaactgaaaaaagaagattcatcaagatattccaaaaatatttaaaagtattctcataattaagatacaagttttcaaatttaaattaaagataaattaaaattacaaatttagttttccacttgcatgagccgtatttcaaatgcccggtagctgcatgtggctagtggctactatgtttaacagcttagatccagaggtacacatacatattctggtggttttcaaaagcataatgatgtaaacaaatagaagaagaacataatttgtagtgaaatatcatttaaataagttgagcataaaaccccagtattttatttttcataaaaacacagctatgcgttaaagtacaggaaaatattagggaaaagtaagcctatgtctatagggtgaggtagcaagggatcaggaaaggcaggtcagaaggaaaatccaagtgacatcttggagagttctaggctgctggtgtgctgtgggttaaggagcttgcccaactcagttctagacactcagggttaaaacaaaaagcagcaagagttaactctgttgaaaaactgttaatactggactcagtgcaaaattatggtttcacaatcatgttttcaaatcttccatttttaagttccttctaaaacagcaactgaatgatgctggttactaccacagttaatgtcatcggagggcatcacggtgaaaaagatcaaaggacgtttacctgaaagcctttcactcttctgatgaacgtggtttccaagtatcacattctcagaacttgttgaatgtggaaagatccaaaataaggccctatacaattaagccctcataaagcagagggaagtcctacaattcacccaccgttgcgttttgtagaacgttaacacacctgctgttatggggtgcgttgtggtttccccaaaaattcacaccgaagccctaacccacagtacctcagaatgtgaccgcatttgtagctaaggcctttgaaaagagaacttaaggccggtcgtagagactcacgcctgtaatcccagcactctgggaggccgaggcaggtggatcacgaggtcaggagatcgagcccatcctggctaacatagtgaaaccccatctctactaaaaatacaaaaaattagggaagcgtggtggcacatgtccgtagtcccagctactcgggaggctgaggcaggagaatagcttgaacccaggaggcagaaggtgcagtgatctgagatcacgccactgcactccagcctggacagcagagtgagactctgtctcaaaagaagaaaacaaagaaagagagaacttaaaatgaaaccattacggtgggtcccaatctggtctggctgatgttcttatacgtggaggagattaggacacacaaaggcataccaggaaggtgcacacacggtgaagaccatctgcaagccaaggggagagagaggcctcaggagaaaccaaacctgcccatgccttgatcttggactttcagtttctagaactgtaagaaaaatttctgctgtttaagccacccaactcacggttatggcaaccccaccaaactgatacacctacattttaaaatacatcagatagctttaggtacagaacaacagtaagagcagaacccctaagtcagatggggttgatcttaaatctagtctgctcgttactggctctgggactcttagtatggcactgagtggtccatgaagtggggaataataattgtacttacctcgtagagttattggggagatgaagtgaatgaatggaaataattattgcctaagtgtttgttgttattctaatcattataattggatgttgcattctggttgtcatagtttcactgctcacatatgcctaatgcacctgaggaaccagggtgacctagcatatcggttcacgccaggtgtggtcttaagaatcataaacaaagataagacgttaaagactgttgtctggtttctctgttgttttcaatggctccttctacaagagcatggctttgaattagctgctggacttttgaagttgaacatgatttatcctgagttttcttttaggattggtcagtgtccatatgtgtaaatgtccatatgcatttggaagcactgagagattaacctcagcagttacaggcacaagaaagaacaaccgcctctatagcactgtgtgtgaccactaacctcagaaagaaccagcattataacaatgtggatagcattctatcatatctttaatttctttttcctgctagaatgaattgaggatggaaatagccctcacaaaccagagggcagtattgctgtgcaccgactgttacgttttgtggaacattacggcagtatgcttgcattataaaatttaacaaattcctagcaaaatgtcactattcactgtgtgaatgcaatctcttcagtgcatttaagttggttaccttcacacatcaagttctagcagataaaagtgggcacttaatattcagtggatgtgctgagaatagccctgtttatatacttgatttcctaaaatcgcataactttttgttatcttgtaatgcgtaaaagggacagtgggatcagagaaagctgtttactatgtcagataaacaagtcagaaggttccatgtaaactacttatgccctgcctggcatcagaaagcttgggctgagttctttacatatttctccagaacatctctgatttaaaaaaatgctaccaagcccactgtttacagacaaaatttttctactatctgtaaacattactggctttcttgagtgatttcttgtctttctcattctcacccccttgttctgtttctccatatgggattgtttctctttcaggtgtcctttctcagtcagaggctagctctgtttgtcttttttatttttccccctaaatttgtgaacaagtcctagtgtccatgaaagtggagaactaatgggattgcctggaggcagtcatatatactttagacaggtgctgcgcaaacttctgctgtcagctggccgagccctcttcaattccagcttgtaaacaccgatggcagcccagccagcacagatgcagccagctactgattattccattgacagacgcagctggttgaccgtgcttcctgaattcattggtgttctgttcaaaatccacctgtttattgaacaccctatgtttgcctaaattcaacatttggttctgcagaatggtgaaactgggcatgtgtgagatggtaattgcttgcgaaaaaggcaatggaaagtagtaaatgaagcatgtgaaaagcagctttattgaatggtctattgtgttaagtacttgctttcgttttacacatatgacccaatgcctgcctagaagtattcatatatgaaatattaggcagaaatataggataaatccattcatacttctggaaacacagctgatcattagtgatggaagaaaaaggttttagaagggcataggctttgattgtaaccaaaaattagagttggctgtagaaatgtacagaatctccaccctaaccctccttcctgggctccagatggacagggcagactcctgctggtgatctctagttagatgaaactcaccatgcctttccaagcgtgctctcctccaggtgttcctccttatccattctccatttcagttgatccagagacttggaaatcacccatgatctccctgtttctcatcctcacattcaaattttttcagttctgcctcctaagtattttccagatcaatccatttgtttccatcctggaggcacatgtcttccctggaggggagaaagcaaggtagggaggtagggagagagggaaggggagagaattctttttccttcttttaaattttattttccattaaaaaaacataaaatttatcatttgatattgtttggctgtgtccccacccaaatctcacgtgttgtgggagggatacagtgggaggtaattgaatcatgggggcaggtctttcccaagctgttctcatgatggtgggtgagtctcataagatctgatggttttgtaagggggagtttccctgcacaaactctctctttgcctgctgccatccatgtaagaagtgacttgctcctccttgtcttctgccatgattgtgaggcctccccagccatgtggaactgtaagtccattaaacctctttcttttgtaaattgcccagtctcaggtatgtctttatcatacctgagaataatacatcattttaaccattttaagttaatggaataatacatcattttaaccattttaagtgtacagttctgtagtgttaaacatactcacattactgtgcaacagatcttcagaactcactcatcttacgaaactgaaactgtatacccattaagcaacaactccccatctttgtttctttctttcttttttttgctgttttttatgatggccaatatggacaagcaaaagaaggtacgtaagactttgggtcaaaataacttcaattgatcagtgtttattttgaaattcttaaatgatgagttttaagcacgattattagttgttggctctgggcttttctttcatgagctcattgtgctcacagggcttggcatggggacactttccagtgtctccccaggtttcttgcactgccttaatttcaacaatcagaaaagagggtaaggtgacctaagatagacacttctgtttggttttgatgattcctcatttagaagaaagcttgtaacagtggaatgaggtatacaatctagatttgagtctcattttcatcatttatttaattgtgaccatgtgcaagcaaaatcctgtatcatatgagctcttgagttttgtctggtagatcaatttctacaggcctttaccatgatatcattgttgttctttctcctcctcttccttcttctcttcctgtaccgtcatcacttaccctgttaaaacacttaaccaaggagtgctgggagtagaaaagggaatgagggacacgatttgctttgcaacattgtgaggaagccttaccctgggcactcatgctgaaaatgcattgagtgatgttacagggggttctgcatgctttgggagtgctctgttctacttagaagtttgaagacgttgcctcacaactttctatattactaatgggtaacggttaatcaaggagttaaaacttttgagtcttaattcacaaaagacagttcatctatcaagatatatttgttcttttataattaagatctgtcacgtctttctactgtattcagcaaacccatgttttcctgattttagggttttacttggctgtaaaatttcctctgagctgcaaagccacacatgtaatctgcttaggaatgaacttttcagcagaagtcaaaggcaaaaaatcaatttagctggttttgacttacaacatttaaaagaaaaatggaaagtattggattttggataagtacttttgctttaacagttttagggtcgagtagatgttcaaatatcactcaccacgttggcctgtcgtttggattattctgttttattattttgaagacataaagtcaacctagtaattaagtaggctgccactgtctgatgtttcatataaagaaacattaggctcttcagcacatcaaatactaatcagctgggtcggacttttttgcttaatatgttatgtcactgatggagatgtgagaaaaagccataactgtctaatcagtgggaggtttattgcattagtcatagattttggggggagaaaatagatattttatctatctatctatctgtctatctatctataacatgcacagaatatgtgtacacatatactgggcagttgtcataagtgctcaggttcaaaaggttgaaagagacactattgtgtaaggctcaagagcatggggttgattttctagacaccttgatttcagatttaacctttactctgtattagctggtagctttagcaagacatgtaatctctccatctgtaaaatggagctagtaatatcagtctcaccttgtgaaaatggcataaaattatcatggtaagtgcctggcacggtgctagaaaaaaagtacagttcgtagaaaataggaggtattgttacttattatctccaaccaggcaagaagaatagtttgtcatcattattggttcacacagaattatattaaaagtattatcatgggtttaatgtcccaaagaattggcaaaagcagactggccacttccatgctaacttaggtgatgtcaccgttgttgtgggttgatgagttgggtgctgtgcagctgttggtgttgctgcttttaactgtccagctgtcaatgcaagggagaatgaagtagaagcccaaagtccttcacagcttgattagtactctagccagtccactttcccccaggttgaaaaggctggcataaaaggagagggtaaattcatgagcatagaggctccatgtttttttccctctgttgcccagtgccatgcataatgccttgccacagtagacacttcatcaaggtaacaaacagccagggaaataggtggcaatggtacctttcctctttgaaatatgtgacaatggtacctttccactttggggcattagacattatcccagccactagcttttaaagtttttatgtttggttacttaattttttgaacattaatatcttttttttttactcatctctgttatgggttgaattgtatcccttgcaaagaaagataagttgaagtcctaatccctagtgcctctgaatgtgagtgtatctggagacggcctttacagaggtaatcaggttaagatgaggtcactggggtgggccctagtgcaatatgacttgtattcttaaagaaagggaaatttagacatagcaacagacaagcaaagagggaagacagtgtgaggaaatccatcaagaagacagccatccacaagccaaggagagagtcctggaacacatcctccttcacagtcctcagaaggaaccaaccctggtgacccattggtttaggcccctgtcctcagaactgtgggatcgtacatgtctcttttctaagccagccagtttgtggtacttggtattttgttatgctcgtcctagcaaactaatagagtcctacaaaggatatatcgatggtaggactatggaggaaagaaaaaagtaagatacttcaggttacattttccattcaaaatgctttttcagtgtagtgtgctttttccaagctcagaaactgaggagaacagggagctgcttctaataaatttctaatgccttttcctgggggattgattgaacacaaagagctcagagctatcttccagccatctgcaagagatgtgtttttgtacacctttggtaacatctaagtaggccggcacaaaagggccttcgtctgagagtgttctgtggaaaggcggccatgattgcagaagcatgtaaataaggagtattatttttttattgtatacttctttaaaatgtggatttttccaaaaagctaaacaaagtatatatttcagaaatgagaataagaattagaagggataaattgagatattcatggaaacatgattttttaaatagatttttggtaataatgggtaaacctccttatttcctaatctgcccttctcttgacctttgtcccaaaacaaatgcattgtggaaagattaaaagaggcaatttcatgtatgaaggtatgacagaaaacaacagaaatccaagtttcttttgtgggtgtcctgagtggtctcaggtagcatcttctccccatgacagctttgtgaacatttcttctccttctttattcagatcatctctgggttgacagaagtggggtcccatagactaattgagatgccgccattaataaagaccatatgttgcaggcatgttctgatcctgtgctccttgttttctccactggcctaatggtaaacaagtgtgtggctaattaacttagcatttcttcgaaaggcttcattccaaccttggcggtaattattattcagggcattgctatactttgacattttcctgaagtgtaaattattgctgtctgaaagaagtcattggctcaagaaaaaaacataaaagacaaactaaaaggaggatgaaggtacttctgagttggtttcctctcctcaaaggtcattatcaaggcagcaaatgctccctggacatgttgaaaatgccccctgtgcaagtgagagtctgaggagcagttggatctgcaagtctccttctgtcgggtcatgtcaggatcatagggtaggttgctaataggatggcttcagggttggaggtgggagatgtaaaaatatttcatgcacaggtacttcttgttttattacttaattttaaatgcatcagtagcttttttttattgagaaaagtccttcagagagatgttttggatacatatctgacacctgtggtttatctcctttgtaaacccccctttctagcttttaggggagcaacaggtttgctattgtgaggtcctaataaatcttgaggccccaggtggtttacccccacctagagttgccttcaagaagtatagatcagccaccccatgttaattaaaaggaaatccagtcttgaatctctcaaagaaacagaaatcatgtcattcccctcagcagtatttctcccctacatgttggtgccctggagtcactccaggaccagctccccagtctctccttctagttcttacatggtccaacttttctttgtgttcgcttcctctcccctagtcctaaatctttatgatacaggcttagcctccgcagttctcttgaagccctccgaaccaatttcacagattctgaagcatgagagagccagaaccaggcttgggagaagggaatagagaaaaggtaagtgtgaggaggacaggggagattcacaaatgaatgtattatggctctgtttcaccccctactaattatcactgagttatggtatgaagaaaggaaggtcaagaaagaaggaaaggccaggcgcggtggctcatgcctgtaatcccagcactttgggaggccgaggtgggtggatcaccaggtcaagagatcgagaccatcctgaccaacatggtgaaaccccgtctctactaaaaatagaaaaattagctgggcatggtggtacatgcctgtaatcccagctactcgggaggctgaagcaggagaattgcttgagcctgggaggcggaggttgcagtgagccgagatcacatcattgtactccagcctggagacagagcaagactctgtctcaaaaaaataaataaataaataaaaagaaagaaggaaattattcattaggtgacatcaattttttgacactatctttgttggacatgtttatgggtgtcatcttaagataaacatttgtttggtgattgattattgtaggcatttggctcattattgtatttccataccatatcatacctggcatatatttggctctccataaatattttatgactgaattaaagaatggtggatcagtgactcttcagtgtaaatttgtgaactcataatttcttccatttcacagatgaggacatttagactctgacaggttaattactttgccaaagttaagatggctcagaaatgacagcattaatgttttcaactcaatacatttggttctaagatcttccattggactgcactgcctgagatactatcttccaccatcatcttcccagtgtgaaagtattgaattcaccatgtgaacactttataggactattttttgcttttgctgttattacattatttctattataacagtatagaaaaataagagaaattgaaaataagatatttagtgcatctttatacatacaatcttagtgataatccagctctcaattatctgtaccttaattaggtgctgttttgattatctgcattctccaaggactctcttgcccatcacctaagcagccttcccctcagcagtatttttccatcacctagctttgttgaagtttggggcattagacttcatcccagccactagcttttaaactttttatgtttggttactttgacagcctttggtcaacatgctcttatgccaaagccccatgtatgaaacagataaaagtggagctgctcagatgatgggagaagtaaggccaaatgagttttaagactaggtccttaaaggaactttggcttttcttggttttctttctagcttgagatatatgtcttgggaacctcaaggcaatatatgataagtctggctaccttgaagccaccgtgtgggagagagcacatggaaacaccttaaggagccagagagggatgcccctaactattcaaatcctagcttaggtttcaggcatacatatagaagccactgagatggccctagtctcagccacggtatgactggagtgtcatgaaagttcagagccagaccttctgactgagatgatccaaaattcctgaccaccccctccagaaaccataagaggcagtacataatgaccgttatttaagtcacttagttttagggtagtttgttacacagcattagacaatcggaactgtaggcattgtatgtgtcttattttttgtgtagaaatttgattgttgttcagttttggctttgtgatctttgtttcgcaccatggtagctgtttcttaatgaatgttaattttcttttcatgttgctttcttctgctctattggaatattctgatataaattcttttatcagtagcgagcaactttttcagcttaaaaatgtatccctttcatttgtcaccaaaatttctcccttaggaatagttcgagcagcattccaggtgtttaatgttttgtaccttaatgaaggcacaactcatgaaaacaactattgaactatcaagcgtttcatgcatattgagacagtattaaagttaaagacaaacgtacaagcaactgtctgcagttatacctgaaaatattatttaagggcacttgttttattctgacaaatttttcagagaatatttagacttgaggtaggtgttatcagactcttagataaaatatataacattattcctaatataataggcttggcagatttcatatgaattacagcagtggttaacattcgtaaatagtcacattttattcccactatagtctgttgaatcaagtaagaaagatttgattcagatcaataactatagcacataaaataataaaccctttcaaaaatgtaagagtataaattatgtgtacatgtggcagtggttaggaaactgaacataaaattttaaaatatagcttgaaaacctactaatctatcagctattaaaatagaaaatagacaaaaagtcattactctgaaatttaataacattgaaaggtgtttgggtgtttatttattctcagtatagaagtagctctgaggcaaggtacagtgcctcacacctgtaatcccaacactttgggaggccgaggcgggcagattgcctgagctcaggagttcaagaccagcctgggcaatacaatgaaaccctgtctctactaaaatacaaaaaattagccgggcatggcagtatgcacctgtagtcccagctacttgggaggctgaggcgggagaattgcttgaacccgggaggcagaggttgcagtgagccgagatcatgtcactgcactccagcctgggtgacagagcaagactccatctcaaaaaaaaaaaagtagttctgagtacaaattttaagacttacttggttttaggccgggtgcagtggctcatgcctgtaatcccagcactttgagaggccaagtcgggcggatcacctgaggttaggagttcgagaccaggctggccatcatggtgaaaccctgtctctactaaaaatacaaaaattagccagtgcggtggtgcgtgcctgtagtcccagctactcaggaggctgaagcatgagaattgcttgaacctgggaggcggaggttgcagtgagccaagatttcgccactgcactcgggcgacagagcaagactccgtctcaaaaaaaaaaaaaaagaaagacttggttttaagtaagctgagtgggttaaatggccatctagattgtttatcaactctggtgagacttcctagtgcctatttggcagtatggaaaacatttttttgaagcattatgtatgtattttctaccttgttttagaaaaggttcaactcagactacacaaataaaaagagtgcatgataaaatgaaaagaattggatgagctaaatggagcaaaataataatcagataaattcacgaatgaggttaaaacttcaatgttggttgttagctcttgttaatgatgtcttaacgtcggaccgtgacaaggtgacgttggtctacgatgttccccagaactgtccaagatttagcacacacttctccttttcttccttcttctcatgttggaagtcaatctcctttcactagaggcaatttcttccagtgttgagccaaggagaggaagtagtggtgaagactacactgatatttcctaatgatggtgactgtattaaacagcttagaagctttaaattaacggaaattttattgcagaaaataagtctcagtattaggatatggcccaatgtgtctctatcttggggaagagcaaaaacaaacaaacaaacaaacaaaacctgttgactgggcagttacttctgttctatttagaattctctctttgtatgcaccctgaatacagctatgtaaaggaaatggatgccctttgaataggaccaggaggaaaagaaatgaaaacatttgttggtttagggtggcgggactatgggctcatttttatttcatctttatgatcattttaatattgttttaagtatctttatgatataaataagaaaaaataaagttttattgcttaccacgtattactagcctccagggtattcgaagtctttggagatgaaactctcattatacagacagccttgttcaatcattcaagcagtatttatctagcaaggcattatgggaaacacggaattccaatagagacacggttctcagagagtcacgagagtcttatgaggtaaaataacatgctctgtatattaaccatatgaacggtttccttttagcaggaaggactgtggttttcttttaggaggaggtggaatctaacttagatctggaaaaattatcagatttgggacacatggagatagggagtcattgatggtattgaccaaatatttttagttcttctttcttccaggtgtatggtagcattatgcttcttgtggtttggtggaaccacatgactagttatggcagtgaattgtgtcactttggactaagcacctaacttctggtgtaagaccctgcagttttctcttccccttgggatggttcctaacagtgtttgagctggtttttgctctcttagcctggatatcagagtgccagagatgggcagagctgatctgctggcccaccatggacaaatagcaggcaagaagtaaaccttttttgttacaagcttctgaaatgctgggactgcttgttatcatagcaacacctagcttaacctattgatagaaagtcaaaagatattcagagtagaagacaatattaactaagacatatgaggaaatacatagcaaaaagttaattttggttggaaccttgaagtgctggcgagaatagtgagaaacaaaattggaaggacagttgggacccatcctagcaagcctggactttgggctaatggtgaaaatagaataatctgttgaggtgtggctgaatcttgtccttaattcattgcatgattccatgttctacccccaaactgaaagtttgcaaaacttatatttaagggagggacctccctataaaattttgaccagtataaaaaaatgtttttggctgggtgtggtggctcacgcctgtaatcccaacactttgggaggccaaggcaaggagttcgagactagcctggccaacaaggtgaaacctcttctctactaaaaatacaaaaaattagctgggcatggtggcaggcacctgtaatcccagctactcgggaggctgaggcaggaaaattgcttgaacccaggaggcaggggttgcagtgagcagagactgtgccattgcactccagcctgggcaacaagagcgatctttttgctgcatggtggccattctgtgaaacccacgtggcggtctgactctcttttctcacctctggaccttggtatccttctaggacctagtgcactatctgatgtatactcatcgctaagctcatttttactgggctgaggagactctccccgtcataagcagatggcttgatcctctgactcaggtttatatattcagtgctctgtgttatctttttatccagagcatgatgaaaatgagttaaggtttataaaatgtttaaagaggcattgggaaaaatatctcctgtatgaatgagatagtgataataataaaattagaaccgaatcagagattggtgaaggaaatttagtttaatttgcatcaaacaaactcaatgctgtgaatggctggtaaagtgaaatcttatttctgaagttcttgaacattcccatttctaacatttctaaccagggctttaatatcattctaatgcagttttttacatgtaaattaatataataaatgtcaatgttgaatagaataaggtcacattttactactttgaccagaagtgtaatcttcaaagattcaattttattaccattataacagtcatactggataaggtcaccaatatttctttccaaatgatataatatatgatgacagcctttataccaactttagtttgtgtaatctggatttatattctgaaacatgttgacgaagatataccacggacatttcttggtcaaatggctgcctagggaagatgttcccctctaattgatgggaaatttgaaagtgggtaaatggagtagtttaaatgtagcattttcttgatcatatcatcttcttgcctacagataattaaattcctgtgacgttttagtctcctacttgaaagggaaaggtggtgtttaaagacctttcagtaagtaaaagcaagaattgccctgtatgtgtgtgtgagccagccagctggccaacctgcacaattcatttgaatgacatgttcattgaatcagaggagttcagggttatcagggatgttaaagggcaactagcaaagccattcaccttgaccctcttctgcagcatcctcaccaagtgatcaatctctgctccagcagggacagttagagtacctaccttatgaaattgttgtgaagattgagtgaggggttatatggaaagtgcttagaaccacatctgccccattataagtactcaatcatgtaagtcactgctgttattgttatcttgaatatgctgttggctactccctcacgagacggtgtattttcatcttcccagagcctgttcttagatgaagctgaaagctacctctttgtattttttactgattgatcttagttttgacttttgagaacataaatgataatgttgatgatgctaatacttgctaattaacatttactgaatgtttactgtgtgttggtcactgtacccaatgcattatcccatttaaaattaattttgaaatgtttcagacatactcagaaaaagcaccaaaaacaatacaaaggatggcctgtttaccttcaaccagattcaaatgtcattcggattttgccacacttgcttcatttatccacttgagtttttgctgaaatattttaaggcaattgctagaagtattttcttagctctacacacatcagcatgtatctttaaagactacgaaaattccctaattggcaatattattatcatatttctttttctttctttcttttctttctttctctcttttttttttgggatggagtttcgttcttgttgcctaggctggagtgcaatggcgcgatcttggctcaccgcagcctctgcctcccaggttcaagcgattctcctgcctcaacctcctgagtagctgagattacaggcatgcgccaccacgcccggctgatttgtatttttagtagagacggggtttctccatgttggtcaggcttgtcttgaactcctggcctcaggtgatccccccgcctcagcctctcaaagtgctcattacaggcatgagccactgcacctggccccattatcatatttcacaaaattaataggaatttcttaatgcagtagtcaagttctttgactgttttaaaatgtctttttatcattgcttggttggatcaggatccaaaaaagatccacaccttatattaggttattatttgttttagtgctgttttaatccaatattgttatgccattgaatttttttttaactgagtcagttgtcctgtagactgttctatagtacggatttgtctgtttgcttccctttagtgttacttaacttgtttctctatcttgtgtttggtgtaaagtaagttagctctaaggtgggctccagggtagatgctagctataggtggctgattatacacttaagtaaaattagaaattcaggttgcttctttgctctagccacatttcaaatgcagctagtgtctgcatagtgtaaacaatcgcaaaaagttctattagacagctgcgggtctatggattattttcagatataagcatttgtagtagtagtattatgtgcttcaaatcacagtgtatagggaggcataatgtctggatgtcctgctcttagaatcctgaaattgatcagcagatttaggtagtgacagcctggttctccattataaagtttcccgtcacactttcatccaaagcaggagttcttaacctttttggttcagtcacctttttggctgttggtgacgcttgtataccttttcccccaataatgtttttattttttatttttattattttttttcaaggtacggtcttgctccttcacctaggctggagtgcagtagtatgatcatagcttactgcaactttgaactcctaggctcaagcagtcctcccatctcagtctcctgagtagctgagaccacacgtgcacgccactatgcccagctaattttttttagatatggggtctcactactttgcccaggctggattgaaactcctagcctcgagcaaccctcccacccaataatgattttaattaaggacagttaagtatagagaagtaccaaggaaattcatgttatttaataccagttaacacagtattaacagcaaatttgtgatacagtgaattatgcatttctttattacatattaaataatgagaagtggtagcagctataatgaccatcataattgtgtgatagtaattgtaatgataagtacttctagaataaatgatatttcaaggtaactgcaataactatcaagttattactttacatattttttaaatacctgtgatttatactgtgacacaactcataggtactgctgttactacagtggttcattgcctacatctgtgatttaataagatacaaaattttagttaaaaattagtaaaaataactgtgtgtcatttttttcattcatgttcatgtgtttccttccttttatccatgcaccctctgctaagcctctgtgggacccccaggttaagaactcctgacctaagccccaaattacctgttgataattttgcatgagtcagttatatttttagggatttaaaatggtgggggtccttttgcttttaatgctagaattctttgaagaattgtccatcattggtgctgtttggttactctgaaatgcagttccatgagaataaataagccccattttgcaggtgaggttactgataagagtttatttgcccagagtcaaatggctaaaaagtggcaaaaatggaattggaatccagatctgagtcactccacaggtcatatgctggattcagattctgttctaccatttactagttggttcacctgcatctttcctccttcctagaatgactgcctttgcaatgctatagtcaaaggttgacccttgtttcctcatttctcttttctttgattttcttcagccatactgatctcttttgtgaatgtgctataggctgttcctggtggctcccaggttgacagaaaactccatgactatccctgtcaataagatcagagtgagaaatcacctccctcaactcaacaccagacttgcattcacaatctgagataaaacgtgttttgtagaaacaacatttctctgttgactcatcttgagcttattctctacaaaaatttccaagctgttttcacacatgctgctgcaaagtgaaacttctccatcttgtagttgagcaaatagtggactggaccaggggagatcacccattggaagaattctcatttttagatttatctgaggacataacttgggaaaaggaagacaacccagagaatgttatgtttatggttataaaacattaagaaaataacagttattttttctactctctacttactaaaataatagttttagcttttatttatttatttttatttattaatgaaacagtaattcattcaacagtcattcgttctaatagtcattcccttagacattttttcaaaccacccacccagtcatctaccatccgtccatgcatcccagccatccatccatccattgacccaccaattcagtgtttagcaagtgctctatgggcagtatactgtatccaggtagaatacagctgagaagcagacattcctgatttctgccctcatttcagtttgcattctcaatagaaaacaagtaatcataaatgagtactaaaatttcaagattgatataagctatgagggatacaaacaaatgggaagaaaaggaaggagggataccttcatgggatgggattgataagtctactaagaggtgacatctgtcctaacctgggctccatatgctggtctttggatccaaggatgaaaaataagtggcctctgtttttaaagagcttctggaccagcggcagataatgcactacagaaagggcctatagtggaacattgtgaaggaaaacatacagctatagctgcattctgttttttgtgtcaaaataaggattttggcaggaattttgcttgttgcgcattatccatatggaatatagaacatgcatggtattgatgttactcattatgtaatctcccttcagtcatattgtgatgtacaagagaacatttggtggggaaaccttaatgctaacagccaggtttaatgatgcattcagagttcaggaggtttgataatataaaagttgtcagaatcaaatggagtcacaaacaaaaccctgacaaatagagctaggaaaggccatgacgggagcgttctcatgtacaaatgcctgataacaaaaactatcataaaagactctgcaaaaagccacgctgcaccaaggccatcacatctgtacacacacacacacacacacacacacacacacacacacagacacacacacacacacacacaatgcttctatgaggacatctgcccaacaactgcctgtccaacctctttctggtgctacaatgttattgatcctagtaaccaaggataattacctcaaaacaattaggtaattctcctcacttgccctttaaaaacctttgtcttccttcacctggctgaatactcataatttactgtggcacatgtattcccaagacaaggcccatttctcaataaatatcattttcttttagagagcctctgttatttaggtagacagtaacatgcagttctcaggctacttgggaaacaaaagagaactttgactttaattttgccaggcagtgtggtgggagaattcaggagcatatgacgacgggtctgctctttctggagagagactgcatatatatgtctttttaaagtcacagtccttgattttccttcatctgctctctcctaatattaagatgcacatcacatatgacactagttcttggcacaggttttaaatttgtggcctgttacctatatgttttatttgccccacccaatattttttaacacattggaagtacaagtacccctcatcttatacagcagtgtgggactataaaaatgaccacgcaagcggaaaccatgcaatgtccacttagtaatcaatgggaaaacgtatgactgttctatgacctttaacgtttttctctaatcattaaaaaccctctataagttatcagagtataaagaaatagaaaaatataatgaaagaagtaaaaaacgaactaatactaatttagtacactgtaatttaaaacattagaaacactaagaattgaagtgctttatttctttgaaaatcacttattgagagtctcttgaacaattcttgccttgtttttcttatcctgcaactaacagtacagatggggcatcttttctgtgctttggctgattgtcataatccctcctaaagtgtggatctccttccaatatttcatcctttgtgttttcaatgtcatgaaataggacgttttttaaaatgtgacttttttgatgtcacttcctctggtacatctttttcttctgcatcataaattctttggtaatttatgttaataagtttgtctttactaaattccttgggttacatatctagaatctcctgaacatcagcgcaattggcattcccaaagtcagttatttgttctataattttatttacatttgattcaaagtgcacttctggggttgtcacatttggttttttgtttttgtttttggtcacttgtgtttcatatttcttggccagttccctctttcgattatccattttggtgaaatatgtgggttcatcactggaagatcagtgggatacaaaactacatactttgctggctgcctctgactgaataccagatgtgcagtgatcagtcactgacagactttggaagaagtgatgtgactggtctctgatcatcatgcacatctatgatctacatggtaatttgtgaattgaagagctagtagtggagcttgtactttacccaatgacccagagttaatgtgacatggtaactgaaatttaaaccgtgttgttggggaattggtgttgtttaaactggagtaactgaaatatgtgcatattggaaccatgagaaggactgcctatagttgccaaaagttaaatagaagagaattacacatagcaattcaaatttctagtttcttcaggaacaaaaaaatctctaggtggtggccacccaccttggggcatgtgttttccagttgtgccagttccaccactccttgttaccataaatttgtggcctctcctgatgaactgtacaatgtaatagctactagctacaagtgattactagctacagggtggtatttaaaatgtaaagtttaaatttaatttttaaatgtaaaattaaaattaaaacaaaatgcaattaaatatggttgattacatcagccatatttcaagtgctcagtagccacatatggctagtggctactatattgaacagtataggatatagaaagttccactagacagcactgctctataggcagtgatctatgttagctaaattatgatggatcgaggaatatcaataacactgaaaatccaaaatactatccttcaatctgaattattcttttttttttttttataaactaaatggaaccagaagagattctgagttaagagtacgttttcagggagaacgcttgtggttttttttccttatagaaacattaaaggtgttggaatctgaactctatggcgtagtattcgaggttgcagtctcgcggaggagcatttaatcagtaagaaacttgtgacacttattttagctgtggttatttaagcagtttctattttcttttaagtgatgatggtaaagacagtgacaatggtgatgttggtaatgagagattatggggccgatgtctgattccccatgacagaagactgttggttgtcaaagacatgtttttaatatctaagcatataaagaaaatgagagtgaattttaggattcttcaggaggaataacaatatacaaatgtgaaactgttgcagaattgccagaacatttgttttgtttccacagttttctttttccttaggcatgcttaaatattttttttcagttatatacaaaatgaaattcaaatatatagaaatcttgtaagttcatatttttatagatctttgtggattattgggtttactaattttttgtgtgtgtgtgtgtgtgtgtgtgtgtgtgtgtgtgtctgtgtgtgaaacagtcttactcactctgtcacccaggctagagtgcagtggcgttatcttggctcactgcaagctctgcttcctgggttcaagaaattctcctgcctcagctttccgagtagctgggattacaggtgtgtgccaccatgcctagctgatttttgtatttttagtagagacaggattgcaccatgttggctagactgctctcaaactcctgatctcaagtgacccacccaccttggcctcccaaagtgctgggattacaggcgtgagccaccacacctggccagatctactaatttaaacattaggtaaaccatatagtgttctgtgctgtctaaacatagcttgaaaaatgacattagagtgaaaaaaacttgcaaattctaaatgcgtttaaatatttacaatatttttccattgtttgttttcacattttgagattttttttattgttagcaaccatattttgaaaaagtcgtaagttagaactggagaggaagactaaatgattataagatgattaattcctagactctgctaccagtgatgcttacattatgagggggaaataaaaaacagagatcaaatgagaaaatggagatgggtgggtgagtggaatgtagaaaagtacagacattttaaacatgagatgaatgaagatctgggttccaaacgataacactggtgctagtgagacactgtttcaatcacataaccgcattaccattgctggattgagggaagctttgaaggatttcatttccattgactatttttttttttttctaaaccaaccattcgttcagcttttatttgttggtgtgaaatatgctattattttgaaaaaacacttttaacatcccaatgaagtaggtacagatattaactccaatttaggaagaggacagtaggctaggagatttgaagaagaaagagtagacaggagttttttgtttgaaaccctggatttgtgaatgtatttctttgactgtttttaaaatgccccagcctcccctgtgattggcagttgattttattaggagacaggtgtaagcagatggaaagaacttttctttccccccctttacaggccttggaggtttagtgataaatgctgagctatatttgcatacaaatcactatcttgaaaaagtttgctttcttgacactctggcagtacagttcattgctgagtagcagttgttgtttttaatgaattgctgctttgtttttagaggctgcctgattaacttactctattctggaagctgccacagtgacattaaaatgtcttttgcttcctgttttggaaacatttggaaatcacttgctgctgaaagttttcactctctctttttttttttttttctggtagaattttctgcatttttattgttgtaaatgatttagcttattctttaattttgaatggatcacacaatcatctttatgtgtccagctgcctttgttggaggagacatgtcttaaattgttcactgctgaatcagattaaaatgacttcggtgttatggcattaaaaaatcttttgtttgtcttttatggaggcttcatgcttgtgaattatggcacattgctcagacagagtgaacttcttttcttactctttagtactgggtatattagattctaagccaaagtgagcaaaagtctgagcctgtttctaatcattctcttggggactaatcttcaaagaattcttctgatttaaatctagatttcttatcttagttggggtcaggagactatttaagaattttataccagaggaaaacaatgtgtgtgcgtgcacatatgcaccattttgcaaacaatttcaggagattcatagaagccctggagcctatctgtagacccaggttaggaaactctgctctagttatttctggagaattctataaattcaagaaagaaaagtctccaaatggtgagctacatgacactgtcccacccaccgtatctcaaaattacatcactcttcacctactacccaagccagaaccttggaatcctctttgatccttctcttcctttttgcccccattagttaagtcttgttgctcctacctcaaacatacatctcaaattctctgcatctctactgccaccaccacaggccaggcctgctttgaatcttttacctagtctgcaataaagatattcccagtggccttcagctttgcaaagagaacccagaatctgtcatacatctccactctccgaaatgcttcagtggcttctccatgcatggcgaataaatacagactgctgaccaaggctatcaagggcctgcactctttcctgaagatccagttagaccaagtgaactgggcctagttcacagccaccttagctggtttggcttgttacggtcttgcccttgcattcttgcaccttttctttctcatctcaccccttatattttcacagtagttactatgtcagttgcctttgtctgctcaccctctagatttcacatctttggaagggagaggatgactgtacctggttgtgctgtatcctcagtgtcttatatagtacttgccaggtagtcggctcttaattcacaaatatttactgaatgaatatacaaaaaaatacagagttcttgaaagtcttttggctttatccttttctctaatattcaactttgtgatctttcactaattcattcagaagttcattcactgaacacatgatgaatacctctcactacgaaatcttcacatttattttaggttgctagctcatggaggactgattttaagagagaaagacgttgattcatattctgtgagaatgccaaattagtgttaagtgtgactctctttcatttatttgaaataaaggatgtttctattaacattagtatctgtcatagaagagggttcctcattgttattaaaaagcatagaacactgttatctttgaacttttccaagcttcactgagttaatagttctgaagttttccatttaaaacacatgcactacttttgatgtgtgaaggaaagaccagtttgtatttatttttctatccctttagctgggtatgttacatttgtattaggaattcataattctttttttttttaccatgaagtatatttttcttaatggtttacatttaagtaagttgagtctggactggttcactggtcttttaagaacccacagtttggggagcattttgaagaaattattcattagaaagaattgtttcccagattaaacaatgaataagcctacatgacatttattttttcaccaagtatttattaaaggccaatgctatgttaagctctgtgtgtagcaccaggaatcctagttgagcctatctataaaggagtatttcctctcttctaaggaggcttcatctgctaaataccacccctacctttaatctcctctctccctttctctcatttcctatttctttcctttcatatttatagtttggctactttttgccttcagatggcatctgaactgtgttgtctggttgctccattggcttggccagctatatggaagatctgagggaaactggaatttttagtctcttaaatgacataagcaaacctaaatttggaatccataatttcaaaacctgatagagcttgcactggaagaatcctgtctatgtgggagtttgggccccaggtttcactctagccaccctatggaggtatgtgctcagggcactcccctcattcacatactggtgaaatgaaactgtgtatatggtgagggtgctattaaattatttatgttgcatgtggttttctagatctgcaatgaattgcagatttttagtattactttctcatctctacttcactaaaaagctttttacagagtttttgaaatgattctcatagcaaagtgtatctgaagtttaaaataatctctcattggagttatctttaaatatttcttcagctgctgagtgcaatttatttcttctattgccatactccttcaagtcttaactcctaagagcatttttacaacatgctcattttcatattggtgtgttcccattctcatgtttacacattgtggacagactctttcgagtgacagttaattttccttttcagtactctcctaaccagaattatctaaattctagacacttctgtatatctctaggacaataacaataataatagattttcataacggttactgagagacattgcaagtcccagaaatgacttctatatcattaagaatgggggagagagaattcttgaaaaaacatttttattgccgtctaattgaagaatggcaggtacttggtatacacgctaatatttttttcctccctggtggcagccaaaactaataaattcctcagttctttcctcctgctccttatcagagcttcagaatcctcttcaacatgctgctgtaaatagctactacaagttggttggggttagcaaaagaggtaaaacctatttaagaacaaacttgccctagtcactgtgaccacgatgctcagaggcccctgctgacctataattcggggtctcactgccagagcagctaccattgcaaagcattgctgcctgtcttggtgaaggaaataaagctgtcggtcacatactagaagttaagggctttagcccagaagtgacgtatatcattttcgctcacaactctttgacctgtattccttgagcttcacccaactgcaagggtccagaaggcctaccatatgcccagacatggcagtaacctgaactgtttggcaaacagcactaatgactgccatatcccatttgatgtattttaatgctcaacttctcagcatatttcatttcacagaatgctctctttctttgcccatgtgattaataggacatgtactcaactttttgtttgaaaaaacagaaaaattactcaggcctctctgtgttttgggaaatgatgctcaaggtttccaaagaacatcctctgaaacatgtgtcctgtgtagtgttctacaatattactaataattaataatcattattattttgtagataagcaaatttgagcagtgctgcatactatttcttatttttgagaagccagaatgcatagtagtacagtaaatatgctgatgaatactgcggtaaagagagctattttacttcatttcatgcagtgtttctcaatcttctttgaccgcacagttttttttctgtataatgtataacagcatcccgtggaagcagggctctgctatcccactctagtaaacactgcagtaggtattatacatggaggtttttataaccttgagaggcattgaaacagcatggacattgtaacagtgttgtagcacatgcccctggctgggattttcacttaatagctacgtgaccttggttatgcagttaaacttttttggcctcaacttctgaatctggacattgggaggtgatattatcctaactcaaagggttattgattatcactagaccatactaggcagcaaacaaatgttatatattgtttctttcctttaatgatatcatttacttctttcccacatacttagtttatatgagcatatttttttccagatatgatgctcttccctcaatcagtataagattactttgcattgaaaagttcacagaaaaatatgtgaaattcaaccaaagaatctgtaccagaatgctatcgggctgcggactcccctgtcaatttactttctttgaaaggcaactgtttgcttctctcgatgaaagtgattcttacttttgagcatccagatcggtaccggagttttgagggcagctcagggcatgttgcctagacaaggatacctgggttctcttcctccagatgaacaaggtctcatcatatctctgacccaaagcatatcccagggcaaaacatgagatagtggatatttgtgagatgcttgccttgagaaccagctctgagcagagtgttatcattatcttaatcacactgctctggaatttatcatattctggaaatcacatttgcttaaaattacatctatgtcatttatggttatggttgatgaatatcccatgaaccctttattgagttactgaaatgagtatgttaatccccattgaaaaaaggtgtggcccaaacaaagcaagatgcttcttcagaattgtatttattaatatttaagggtgatatttctgcctttctgatatgaaaatccatcaaagtgcttacgttgtgaatagattactttttgagatgccgcctactttgactcaaagctctgtaattgtgctatttaaatcaaataaattgaatattttcttgaaaagtagctgacagtccatcctgctattgttttgtgaagtgacattaagaattattttaaacatttacaaggcctaggagtgtttgttagagcaaataatgaattatacagggtctgctgaggtctgcattgcaagctggaatgttccttgcttatcactaaactacacacagatctgcagtcgagatgaatacagactcttttttattagttcagaagaatgattaattctgtgttgtattatctgatactgccttacttcatattaatatatacacaggctaatcagcctaatcaaaatcagtgatattttgatgatttgctttattttggtgacttctatattctgaatccctagaatagatcagatatagaaaactaaatgggggcgagtctgagcaactccgatcataatattctgctgtcatctttaattaatcatctgaatcagtacatttccatttatctgtcagtgctccatgtttaaatatttcgtatttgtcatggaaatcctcctaaaaatatttttaatcaattattatccttgatgagcaaattttgaacttatcaaatttattttgaataaaaatgtggcaacataatggaaattttatgtagttgggaagattctcccttttgcagcatccccctttgttctgactccaccagtcctttgcagttggttctgtgtttcatgaggcagtgtgggaggccacagaaatggcacatgcatctcatgtcgcgtgcccattctcactggtgttgactgctcagaggttatattggcaagtatttggggacactttggttaaaggagagaattctgtggtcgattattctgccataagtttaccattggaaaatagtggcagatgtgcaatgttttgccatctcagtgtaacagaaagagctttggttggggaagctcaccagttgagctccaatcccaactgtgctcctaactgtgtgactttgaacaagttaagtaacctttctctccctatttttaaaatctgacagtgaaggtattggagtagttgatgtttaagatccatctcggctgggcacggcggctcatgcctgtaaccccagcactttgggaggtgaaggcaggtggatcacctaaggtcgggagtttacgaccagcctgaccaacgtggagaaaccccatctctactaaaaatacaaaattagctgggcatggtggtgcatgcctgtattcccagctacttgggaggctgaggcaggagaatcacttgaacccaggaagcagaggttgcactgagctgagattgtgccattgctctccagcctgggcaacgagagcgaaactccatctcaggaaaaaaaaaaaaaaaaaggagcatctcaactctaaaatgccatcctgtatttactcactaggacagccaagataccttgggcccctgttaatttttaaacatccctggaacttcctagtgtccatatcccttttgactgtcatctttccactcctccttttagaagacagaatatctctaccttgaatctgggttggcttgtgattttctttgaccgatagaatgtgggacaatgtaagccttaagcaaattcagagattctgcatctattgggatggaagagcatgtagagtgaagggcctagtggatgcagctgagcccagactccagcctaccttccatctgaaagcagttgcatgagtgagtccaggtgagaccctcagcaaaaaccatccacagacttatggtagtaaaacctatcaatgttggtttgttgttgttgttgttgttttgagacagagttttgctcttgtagcccaggctggagtgcaatggcgtgaccttggctcactgcaacctccacctcccggattcaagggattcttctgtctctgcctcctgagtagctgggattacagatgcccgccaccatgcccagctgttttttttgtatttttagtagagatggggtttcaccacgttggccaggctggtcttgaactgctgacctcaggtgattcgcgcgctttggcctcccaaagtgctgggattacaggcgtgagccactgcgcccggccgatcaatgttgttttaaggctctatgatttggggtagtttattatgcagcagtagataagtgatatagaaactggaagtcagtggctctcctgactctagaaggtctgagatgatctctgacagttattgctgactatcagctgaggtgccttagttctttcttcatgttgccacttaacaggctagctgggattttttatagcatgttggtctcaggcttccaagagagcaataatcagaggtttcaaggtcacttaaggcctaaccttggaaagtcacacagcaacactgctatagattggatatttgaccctccaaacctcatgttgaaatttgatccctgatgttggcggtagggtctaatgggaagtgtttgggggcagatccttcatgaatcacttgatgtcatctttgtggtaaccagtgagctctctactgctctattagttcccagaagagctggttgttgaaaagggtctggcacctccctcctgtctctcttgcctcctttctcaccatatgatctctgcaaactgttttcccttccacttctgccatgaatggaagcatcttgaggcctccaccaaattcagaagccagcatcgtgcttcttggacagccttcagaactgtgagccagataaacctcttttctttgtaaacgacccagcttcaggtgttcttttataacaacacaaacacaaagtaagacagacactcaaggggaggggaaatagactgcaactcttgatggaaagtgggggaaagccagagagcaaaacagcatgtgtaggatgggagggattcttgtggtcacatttgcaaatagcaaaccacaccagctctaggcacctgactaatgcgaatatgtctttctttcattgtgtgtattctgagttggcagtgtgtcagcaagagttcagcatagggcttggcatgtggtcacaccactttaatgcagcaaaaacacctaaagtgttcatgttcaaaaagagagatagtcagttctgggctggtggtgagcatgaagaggaggagacgaaaagggaaaacaaaaagaaaggattgccaagtttctggtagtctcttgtgatatgaatcatgtgttgtgagaaggtccataattctcagtaattagactgtccaacaagcaatggattcagtgtgtctgacaacctgacccagtgatagaggctgcagtatctaaactttctcaggagtctggcccatgatggagcccaagtcaccttgaagcaacccaaagtcaggatgagaaggggcaaaatgccagctttgtatccctctttacttcctccagttcaggcaagctggtactctcccccctttttgatcttacgattctctgttaggatgaaggcatactcactgcccagtgctgaggcctcctttcattgtgggattgtaggtctcgtctgctttctttttccaaggttaggtgtttcttaagcgttcagcatgtttgcatcatagccttctatttaatgaaaacagtggttcccttctatgaacagagtgactagggaatgcagggcacagttttaataagaggctaggcaaaaatggagtcatgaaagctctaacaagcatgacatcacagcactgtcattaataacatgaactttagaatcggacagacgggttgaattctagttttaatctcattttgagtgtgctggtgtggcaagtttctaattttctataagaaattattgcttataattcatcttcaacatgggaattataatagtattaatagtttatgggtttgttggaaagattgagtaagtaagagtacgtacaaaagtgaaatggtgatttgggccaaaggaggaacgcttaacaactttctttgaagctaaccttaagtttctggaccatttttaaggacagattttggtctaggtgtggagaaattgttctactttaaaaggtgaaatgtaaaatgagatggaaaagtttatctaacaccctgaggcagaattagatctgacctcccctgtgctcccacagctttctatactgatttctaccaatagcattcatctctctgtgttgtaatgatctgtttacactgcatgacagttgcggacattagaatgtgaactcttcaaggtcagctactctgtcctggtcatcttagcatcctaagttccagcatagaccctggactgagaggagactgcagtgttgggatggatgagtgagtaggttgccagcccaatccactggttaaatcactccccaatttttaaagtccagtttaaatctcatctgctctaagaagtcgcctttggttttcatctactgtgagaaatctccttgtcagctatacaacctaaattataactattgaccttcgcttcctttaaaaaatattattgctaaaaaaactctatactctagattatagggagaagtggtaaccagttccacaagttttcacacatgatatgtactggataaaacatttattcaattcaatatagtaactttaattctttaaaggttatcctacatgttggctaagaaatcttgacagaggagataatcccaagcaaacaggatccagaagtaaatgtgtcttcatagcctatgtataatatggaatttacccattaacaaggcctaagaggctccaaattaaattatattgcatctgtgatattattttaaaacaattggcatataaaaagtggcattagaattacaaaagctatctgctgttcttctaattaatttgctttccctgagttgtttttctaggagcaacatgcaaacaagcaaaattgacaaacaataagtttttttatggtgttgaaaaaaaacatttttggatgtcattgatattactaaatttacattagatacataggttgtctgatttattccaccagttttcacagtaagccattgttgaagtgaaatgtcttcctcccccaccgagttgctgtgtgtgaacatagcctaacatagcacttatggacttcgttggaagcttgcatggttgtcacccttgctgtggtttggtgaagtcaggcctaagtgagggtgtaattcaaatcagggaggaggaatatggggaagggtcccttttaacacagaaaaagcagcttcgtgggagtggaggctggcaatctgctcaaaggaaatgaaaggaaattcttcatttctaaatggttcattgacccatgataataaagcgggcctgccaaagatggataattatctttttaagtatcagatgccctgtgggtgaacgcctcccttctcctctcttgaaaaatgaactctgattttaaaaatgcttcttttcctagtttaccattgacatgaatttcctgattatgagcaaaattaatcagtttcttctttctcttcccctctctcttatggaaatcaggcctgaccagctgagctcagttgtgtttccccttgggctctgagttctaccaatagcggaatggggttgatattctagtgagactagcaattgcagaattatggttttattatgcccctcagctgcttagctccaggcaggagcatgctgtcttaaaacaacaagaaaaaagaaacagaaaaacgtacaagagtttgtttctcttgttagtatctaaaaactaaacaaatatttatatatatagtgtgtgtatatacacatgtgtgcatacatgtgtgtatagtgactgaaatgttattgatggtgtaacagtgaatattaatttcctatcaagaagtaatcaaatttctatccttttttctcagatcttatatgttgctgagaccaatagtgtaaatacgttgccttgtctaacttgtagaatgcattaagaatgctttatttgaataaacagacaacctttcgttcatgatttaccttcaaatgtcttcttttggattctaaaaaaaaaattagtctgaggaactcttgtcataaattgcttaaccacatggcacctctcttagttatggataaagttcactgtacattttcagaatgtctatactcttttaaaaataaaataaacatctacttttgtatgttcattgcataattttcttatttctctaaagagataatttaaattaaaaatttatccccatgttctacctagagaaaccaagtagatattccagttgctttttcaacctagtgcctttggctgctgaagcggacacagctttagaataggggtcaagagagaatgatctagaatagatcttgcctcctcgcataattatctcaccatacacttgagtctgtctgtacacgaatgtccctttcttttgcaagaaattcttctgcataccacagcttctccttcaaagtgtaattatccatgtatgggagctctctttcaactctctggagttcagtggatggtaaatatctgtttcttcattccttagtctttgagagttcaggccctggtccgagaggattcaatcctgtgggtatgaactgcttggtaagaacactacccaaagccagcagcatgggccttaacagaccttgctacagatgtccttgtgtgcccgctgcggccagtggagcgcttccatgacctgcgtcctgatgaagtggccgatttgtttcagacgacccagagagtcgggacagtggtggaaaaacatttccatgggacctctctcaccttttccatgcaggtgagtgtacagatttctcagaaatgatttttcttccctttcatatcccggcattgggcttgctcctcctgatatcttaccaggagggcagatgtgattgtttgtattttaggtagcagccaaaaaaagagatttctaatgcagggcaaccctactgtccattggccccaagatggaccgtgggatagtgtctaaggtgatgtctgaggcttgtttaccaagcaggtgggagtaatggataagtgatttaatggacattcagacattccaaattgcttactggaactgggactggaaaaatcattttcattccatggtaactaatttttgagcactgcatagactaagccctgctctaattccagggtggcagtgatatgcagcttaggttgggccttaccttttgtctgtctttaattcaagatgcagagattgatcacagattagttagaagctagattcactggttgggtgtggcccactgaccagtgaagaaatcagatccccagtcactgaagatttttaggcagaggttgagccaacagttgtcaggttgggagaaggatgtccatggtgagtcatcagtagggaattgagtaaatccgtagtaacataccatgagctccttcaggccctctatggaaagggctggggtatcaatgtataaagtccttcatggctctgaaattggatgactctgtaattgccctttagaaggacacactttcaaaatgtgaggactctgtactcagcctgttagttaaactgaatgtttgccattcttcctcccctccttagctctttaccatagagcttcaaagagaccagataaagaaagccagtgttttcaggttatgaaggctctgactaaaagtgctcatcttcttctcaaacagatttttttctttctttttttgctgccatgtctgtgttaagagtagctaaacttcccccaaatgctttgtgtgtatgtgttgtatgtcaaaccatttgagtccccttcaggcaggtagttcagttcagagtgggtttatcaagcttatgttgcaaaccgtgtttctggagagactaaatgaaggcagtgaatgaaaacctctgttaatgtttagtgagatacaagaataaaaatcacatttataggaaatggccattgctggttatggaacatttttcactagaaagttaattccataaatgtaagagctgacttgtgttagcacctagagtactttcgtatatgcaatgtggtcaaactattttttactgtaacctacagtaagatacatatttatttcaaaatcatgcctgtctcccctgacacacatatatgaaatatatgcatatgcctatattgataaaggaaaccagagtttcacaaaacaatgtttactcattctgtgcagtctaatagtttttattctattaagatctgatttctggctgggtgtggtggctcacacctgtaatcccagcactttgggaggctaagaccggcagctctcttgagctcaggagtttgagatcagcttgggcaacatggcaaaaccctgtccctaagaaaaatacaaaaattagccaggcatgatggtgcatgcctgtagtcccagttactcaggaggctgaggcaggagaatcacttgagtccaggaggtcaagggtgcagtgagccgccatcatgccaccatactctggcctggacaactgagtaagaccctttctcaaaaaaaaaaaaaaaaaaaacaacaaaaaaaacacctgatttacattgtttgtaatgctgattgcaacccattaagttgacttcatgacccactaatggattgtgactctaagtttgaaaatccctgatatacacagttatgcttaatccttacggcgggagttctcaccccgttagtcaggctcatagaggtagacaaacctggctaaagttgcagaggtgaaattctattttggaatttctgattgtggagccattgctttgtttggccatctcaaccagctgagtatctgcttttgctttatattatggctggtgacttggtgagtttgcccatttccaactaagcttcagaaacagagaaagggaaccagtttgggaaaagggtccagctacaatgaacactaccatttgtctcccacaaggtcagaatagccagaggactcttcccatatgaaataccccatattcttccttaatggcttatgtttatagcagatttcctgagtagaagcttaaagtaatcagacattaattaaaccacctctaaacataaccagaaggtgtgatacttcacctccccaaacattttcagccttcctttaatgcaattaaaaccatagcctagagcaaagagcatgaaaagtagcaaggagttggcttgctggataatttatatcatttttatacataacttcgcacttactctcaggcggaaatggagaactgtctaatcccgcacatttgaagccaatggtccccatgagaatactataaattaacacacaatgaaattgcatctaaattattaatgggtgatatttctgaataagcaggagataccatctatctattctcacctctgttggttttttcctacttctaggatggccccgaagccggacagactgtgaaggtgagtgcttattatgtgcatacaaattaataagaggcgattatgagaactaataaaaaatcacaacgagtcatatgcagcacattgctgtttcattatgttatcttcgaggtcagagagaccctcagtgttagagccgtaaatcctgacattataaactctgccaaacaatatgtttcccattggtttacaagacatttacttttagtagtaaaattattattgtgcaaacgctaaaacagaaactaaatcaaggagtccggaaacataagtcaaagtggttcatgtgagagagtgtctaggaaatagcatgtgagcttcctgtgggtttgtgcagccccatgttaagcctggggtgtctttgacacacctttgcttcttgacatagtctgcttttgcttcattgtttttgagtgaagcaataaccgcagcagtagcatcaagctgcctcccttcctttctgttctcctgtgcttctctctgttctccttctcgtcacccccacacctactcttttcctccctgtgtacttaataccaaagttcaaacctaatggagtcagtggagctcaaagatgggtttttaagtgtgctaggagaagaaaggaggatttattaggatagtctctgcttctgtagtaaaaataaaataataaaatcctggctgattcagaagctgggtttcagctcttttcatacaaatgctaattcctatacgggtagattctgcacctaagtcatagaaaaggctctatttttggtgctagaagtcagaagcaagtcaggctgggatgttaatgttacactttgttgaaataaagtttaatgcttcgaagactagctgtgagtggataaggtgctgcccacacaaacaatgccaaataaacgtaagttcccttttgatcttactttacttttgtctttaacacagctattctgggacttttaaaatacaatctctgggaaatacttctaagcagtgaaagtttatgtagggactgccaccatatgggctaccaaattccttatcataaaaaagggctagcctcctaattgctctacacacagggtatggtgatagacacagaggctttcagctttcctctgtcccactgtctcacctccatgtcaggctctaaatatacggatgcaaagaaaggatttaatacctgtggcttctttttgaaatcacttcttgaaatgcaaaacacaaatgtttaaacttggttccaagattttttaaaactcagtattcaaatgtaaattccaactataccggattagttagatgcactatgcaatatctatttgatggaattccttcagccattgaaagcgatactgtagaggcatagctagtgacatgggggaatgcacaaactgtattaagtgggatgcacagaatgataataggtgcatagtaagcatagctaaaacttatatgaatagataggttatatgatctcaaaatttcatttagccattctaaagcgggatagaaaatatttgctatgcaacaggctctgaatagagatagaaagtagattagtggttgccagggactgggacaaggaaggaatggggaatgattcctaatggatacaggttcttttagggtaatgaaaacgttgtggacttagtggtgatggttgtgcaacattgtgaatataataaagccactgaattgtacgttttaaaatggtgaattttatcatatttgaattatctcttgactaaaaataataaacacacacacacaaaacaaataagcagtgagcctagctgggctgataactatggctacagattgtgtaactccaatagtaattactttttgatgtcccaattatctggccaaaatgtgtaatgtttttgttacctttgatggtgatgatgatggactaattcttaacatatagtacttatatatgaattgttgaatgtggttattgttatcatcaccctgattatttagcttaagttgaactttttaaaacgattctgttttttaaatcagcaggttatgctgttttgcacatctttcagttgtttccaacctgatcacagaagtttcctgatatgaaataatggggatatcttgactcgtttgtagaatatggtggttataagaaaaccaccatacacacacacacacacacacacacacacacacacacacacacacacacacacacacacacacacataaaatcccagagaacaatgaaggttccaaagctgtccttttagacaaagtatccatatctaaagttgttgaatctgcttttcaaaatgcgatctttgtatcacctgcatgaaaattaactttggtatcagttaacaacaacaaaaagttgattctcagttcttattccaaatctacttatttagaatactgtgactggggcttgggaatcttcattattaacaagcacatcccgtgatagatatttgccagcctcagtattgtatgatgataaaatattgagtggcaatggccacataattatgacccctggaagccagtcttgcagtagccagcccctctaggggacaaagcagcatctttaatattcagctgtccagttgtgaatactacaattcaagactctgagcatttcatattttggaattcacacagttgcacattttaaggcagcatttgacaacctgccatggaaagcacagtgactgttctcttcatctttgcctctgtgtctcattcttgagattctgcctgatccctgggttctaaaccatttttgtctcatgctgagtggtaatagcaataagcccagtaatggtcttttcccctggagcacctgttgttatcgttaatgaaggtgcaccactgagttagcctcttgaacatgataccactgtagggtttttttgtttcaggggctttaaattctgctttgcaaagaacaagcgtggccttgcttactcagtaaggcacttgtagtcaggaaagggaaatatcaaagtaaaaaagtgacctcttatttcacaattgattattaactctcctttttgggtttaaaaggagtagaaccctgccatccacaaggtgattattgcagcagtttgatgtcctgcaggcttgagaaataatctttttctttcatcttcaaccatacagatccaaacagcctccctgacccttcatctgaagtagctctcctaaagcccctactctctgtcctggtgcatgatttgatttctctcgaggcattcttcattgtcttttgtttgtttggctatgcacctgtacctctgtcttttctctagttctttgagaaggtaagctttgtgaggacctggattttgtcattgtttatgataggtctcaggacacgctacccccaaaatatgctagctctgcatactgagtattttaaggtgaaggaaactgagaaaactacagaagcaggaacatcactctctgacctttttccatttgtctaccctcaagtgtgccataaaagaattctctgacctaacacccatgcaagtaggtcataagaccttcattccagaggagttctgccctctactcacatgccaagaagaatctgaacacacaggccttgctaagttttccccaatttattaccatcaagtcatactcttttatcatccaatcatacttctgcatgactgtccgtaaaaatacacagttgtctttaggtctttatttctaaaggctcccatggcacataaaatttatattaaatatattcgttaggctttcctctcgttaatctgtattgtgttacaggggtctgagccatgaaccgggcaatgggtaaggaaatgacacagctttttctccggtttattttctatgcctcttttgtgtggggaagagaatgatgatgataatggaactttgcttgttgcttgttggaacgaatctcataagtttctaactttagttaacatgaagtagaagacgatatgtatgtgtattccagcatgcagtcagcaatattcctggaatctctatcaaaagtcttctatattccaggtgttactaacgaagactaaaatttccacgaatcaagttctcaaatcatgttccaaaatgtaattccatctaatctaaccattaaggcaatattcatttctttagaagcgatgctgcttaataagttaaatgtgagctatcttttagaacaattggtatgttcatctttgggtgggaggcggttttaggtatattaaggacagatttattccaggcaggtaatctggaatcttgtaagaactgtttatagattatgcttgcttacactcttctatgtttatggtacttgaatcttctacttagaaatttaattttatagtattaacgcagtgggaagtagctgttaataacttttaagatattagaaattactttttagattgctctagaagaagaagataattatttgtagaagtataattcaaaaattaaatgagataaaaaggaagctcttctgttcactgagaagtttctgtggttctagaacaaattttccacctgaaaatttggtaatctttcagattcatgaaaatgaggacattttatctcttaattaagtctagtagttaacatactttggcatcagaggttccgttaggaatattagccatattaacttcctaactgtgcacctttggatcagccttttagcctctctgaacatcaatttccttgttttttttttttgaatgcggaaaccctatctattatattgaatgatagtggagaaaaactgacgtattgatgttcagtacatggtatatgtagcagagattggctaggatttggacatggatatagaatctgaccagtccaccccagttcaaatcccggccctgccacatcatggcccttggacctcgtacatgtttcttaacgttaatctcaatctcagtttctcatctataaaatagattgtggctaggctttaaggggttgtaactagcattgagatggtttgtggtgctgccaaattcccttaattattatacactgaattctctcgctacgaatgactgccttttggttaaattcttgagaaaactttactctgattatatgacttgtgctatttaaatatcttatctgaacttataaaaatgacactttgaaaattcagaaatctgccttcttaattggggaaaataatactggccctctctgtccgaacatttttagcctctggtgtatgcacagatgatcacgagtaagtcgcggttacaaatcgatagagtacttcacagttacctgaagaaggtagccataggacagaagcctgcctgccccatgctttgctgactcggtagttctgatgtggggcctaggactctgtcctaacagacaccacaagtgattctgatgcacacttcacttttctgaagctgctttcctaaaggagtgataagaagcacttgtagggggctgctgctctcaacccaaaccaatttctaggaaagatttgatgtgtacagaaagagagaaagccttatcttgaggatgaaaatgattttcttttaccgttacttattattttcatttggaaagacactccaagagagatgtgatttgccataggacttttatcctttcattacagccatggtgaacagtgccctgactatgttaatacctaatgcatgtatttcctgcatgaagaattggtatcttcaggatgctgtagcttttatcttgtataattgccttaaaatttgcatctctgccctcagaatgaatccagtttgactgggttggtaaaccaaagacaactgcagtgctcagggggatgggtttgggtgtacatgtgggagtggacgccttagagaagtgttgaggttccaagcccttttcctctggcatgtaaatatctctgacttcccctccctctcccgctcctggtgatttgaggcaaaacccccagtccccagctctccaggcagaaggggctgggggcctgcctgtctcctttgggaaacttcctctctcctactaaaccctcaggccctttcctaagtagatatcaaatcattgagtttttccgtttctagtttgttaactttgatttgcatgataccatttggatcaaagcactgaaagaaaaattaaccaagctccctagtattttcacgttcttatttactttttccctgttcattcaaactcaaaggcagctaaggtgaaagagatgagagagatcctgaagcagggatgagggtgagaagaaaatgcagggaagttaaagcatactgatgaagagggaggactctggggccagactacttggtttcaaacccagagctgtcgcctaccaggtgcatgaaccctgggcgagttaacctttctgagctcccccacattcattcataaacttagaaaatggaggtcttaagagtatcctgtctcttgggagtgttgtgaggaccaaatggattaatgcatgtaaatccctgtaaaatagtgcctggcacatagtaaagtctcaatacatgttcaccattagttttataattcttacttcagtcctcacaacaacctgcaaaagtaggcattaatattttacacttagggaaactgaggtttaaagaaaaaaaatcacatactggaaaagcacagttgacagatagtggaattgggattcaaacccaagcctatccaaaatttcaactcttcattatatcatatgaccaggctgttcctaaagaaatatgttgtatcctgtaatcacagtagaagaaactcaagcacaggttttgtaaatattttgtcacccttaccacatattaatctgtattattttgctctgcttggaataatgttggtttccatctaaaaatatccagaggacaatccctgtttattacacaggtgaagcttaacctaaatgctgctttattgctgtatgtcaatttatggcagaattatatgcttttagtgtttaatttttcattagtactaccaaacaaatcccctcagtaattagaggccctgacatatagcaaagtggatatttggctgtttaatttattttgctatttgtaatgccgacacgtggcacatatagtagggacattcagtgttttataggattcagtaaactgtcttttacacctgaggctcagagcctgtaatttctacttaatcactgtgaagtcaaacctcctgtgaaaggcaagtgttttgtagaccctaaaataccacctaaatgtaaggcgttattattcagtcagagtcttacctttgttgatgtagtaaggccggttactcactgttgtcattttgctataggatactagtgctcaataactaatcattgaaggagcactactctgcctcaccattttgctatgggtgtttcaagcctaggaaatcaaatataaaaatctctaactccatgtaatcagctcattctaatttcaaaattttaaacctgtgatatccaaatacttggctggccaaactgtcaattctgttaaaaaaaaaaaaaaaagtaaaataaatgcagcccaattaatcatgtgagaaagattcagtacttttgattaaatattagtggccaattcaacctcagtagatgagccatttgttttatttttatttttttgagacagagtctcgctttgttgcccaggctgaagtgcagtggtgtgatctcggcttattaaaacctctgcctcccgggttcaaataatcctcccacctcaccctcctgagtaactaggactacaggcccgagccaccatgcctagctattatttgtatttttaatagagatgaggtttcatcatgttggccaggctggtctcaaactcctgacatcaagtgatcctcctgccttggcctcttaaagtgctctggaaccatttgttttagactacaccacatccttaaatacagaatggggaatgaaagcccatacaataatgtgtgccttgattgaaattgggccttttagctgaaacagatccaaatgctacaaacttttgactagtagttattaacagcaggaaataataaaataaaagaacaggttgcttataggctgccatataatttataaacatgtagatctatatatggcttagaaggaaggacacagataacattcttactgcctctgggtggagatagtgaggggaagcagtgcaatgtgggatgtgaattgtacccgagggtttcggctttacagtgttttatttttaaattgggtaatgtgtacatggttgttgattctattatttaaagtgcattttaaaagaaaaaccaagggccccatttgaagcactttccattaagaaatgactattataattcattctctttgctttattatctttagcatatagctagttctcatgcctcctattttccaatctctgagggtggggcccatgaagtagcttcttgaaaggtccacagttgattctgatggttacccagaatatcaactgcaatttcatttgtttatttttataaatatattttgattcttggtctagatgacctggacttgattctttcttgatactcatctcaaattattcagtcccctcaggcgcttctctttaccctttatgccaaagtcattaataaagtaagtctcaagacacaaaaagcagctggaaaaggtaaagatttcatggctgagccagggtcagatggaaaccagcttaatgaataatagacaaggcaacctgcagagccacagatgtggaagaattagaataatgaccttcctgaggacatttgagtgaaaaatgttgggatggtgagactctataatggccctcaggccaaacatggtgaggaatcctttccctccttctaagtcaattatgttagtgctgggaaagggtcattttgaaattttaacttcccatgtcatgaggcatccatcctaccttattgtctaatagatccgttctccaaagaagcctcttgttcaccaaaatcagggaagttgagacatatatcttcggaagccttctccatcagattaatccaaaacctcaggagggaagggcaacaaacaaacaaacaaacaacaacaaacaaaaaaacacacacaaacagtggtttgaaattctaggcttattcaacataaagataatattattggattccagtaatgaaaacttccatttctttccctggtagtttattcttttaaacaagtcttcctggttcctgacgttacatgaaaaatgaagatggaattctttaagatgttgaccctgcctagggtggttgagaagaataaacaacattgagttaacaaagtgaacacaccaaatattcttttactttgtggtggaattcatttatcctaacgttcacattcaagtctcccactctggggtccatatatcagttcgtgttcccccacaaaatattttcttatcatgctttccatcctggtgccctgacaaacagctcaccaggggcttttatttgcgtttaaattcgtctgttggttgtaaatggtataaattcccagacgtaatcaggttctagcagtataattttgatgaaactgtttggccaaggaaggaataaatgtgactccaagctctgctccactatcagatgaccatcgatgaatctcactctttaaggaagaaactcagagcacgggataattcaagaaaatcccagaggagcaagtgaccttaaaagtcattagcatcatccactacttgacagttaatcacccctgtagcatttaagtctgtctttcatcttcctctatacctggaaactcaaagcactgtgaggtagctgcttccagttctgaatcgctctgatctcgatttcctcactaccaaagtagtctgttcctcccttccaggaaatgagtatcctgcctactcatgtttttctatctggcattcattcattaatttattcttctatcacctactatgtgccagatatcgtcacaggctctgagaacctaagaagaatgagacgtagtccttgttttcaagtacagactttgaaatgaacaccataatgcaggaaggctgaaaaagttgtagaaattctatagttaatattaacatattactccaataagtgtttattgagtgcctactatgtgccatgtgctcccaggcactgggttaaagtggaaggcaagacagcctaggaaaaactctcagtgtattgtcttcttccccttatgtgaaagggaacaaataaaatattgcagatttgggttaatactagaaagactaaaacaaggtgttatgaaatggaatgacatggtggaaggggaatggggtggtatggctactttagatggggtggtcactgaagagataacccataaacccagaacagggaacgacaggcgcctagccagcgaagagctggagaagaaagaccattctgggaagaggaaatggcagtgggaatgagcttggcacattctaggaaataattgaagaccaggtggcagaaatttagtgtagggagagtggcagcaggagagaagtgggaagagtgggcggggagccgttacactgggacttatgctgtggtaaggaattgtaattcaattttaaatatatttgatgttttgatgatactcagagtgtatttcagggcagagggtatttcacatgtgcttatgataggtttcctaaattgttttttttttagtttctaagcccatttttctagacttgaaggattttctctcatgtctatcttaggcactgtggttgtccctctagcattcttcctaccctccctcttgatttagtagccacaaaattaggatgggtttgaactcatctttagctccaggtgcagaccttgtttggtacacaccaggggttggcagacttcttttgtaaaaggccagatagtaaacattttaggctgtgagggccagatggtctttgtcataattatgtatctgactttacagcacaaaagaagccatagaatatatgaaaatgaattgtcacaaataagcatggccgtattccaataaaactttatttgtaaaagcagatggtgggccaaatttggcctgagggccataatttgcccatcccagtctaagtcagttgtctctgccacagtaatgactttcattaatcctttcctaagctatttagagtgtaggattcccttgactttaggaatcctacactctaaaggatcggagtcccatcatcatggaggacttagatgcattagttgtggatgggctgttttctccactactgcttatgaacaagaaagcaggtaactgacagcttctagcagccatcttatattttctagggcaacatgcctcagagcaaaacagatgctgaggctgacatggcagagacagaaagaagctggacactaggtgacattattggattgttgaattaaccagacttgaagcctgcattacttccagacatttaaattaggtgatctggccaggaacagtggctcacacctgtaatcccagcactttgggaagctgaggtgggcggattacctgaggtcaggagttgaagaccagcctgtccaacatggtgaaaccctgtctctactaaaactacaaaaattagccaggtgtggtggcacacccctgtaatcccagctacttgggaggctgaggcacaagaatcacttgaacctgggaggcggcagagggtgcagcgagctgaaattgcaccactgcactccagcctgaaaaaaattaggtgaccaataaagtcctctattgtttaagccagtcggagttgaagtttttactatgtctaacagaagacacgttccactagatcatccactctaaaatattcagttattgttgtttcttaatatgcttaactggcagtttgagtaaacagtttctaaagtgcctctgcatatctgcaatactcatcacatgctagtgggaatctttgaatgaaagtctgtgaatcaatggccctagaagagcttaacttccaataggttccctctagtgcgtgaccacacggtaattccattaactttaacgatggtggtgctgcacaaaatgggccctgttagtctattctctcctttctttttagcattaaatcttatcctgcagctagtttttcacagtaaagtatgtgtaccagtgccattcatttcttgcccttttttaaaatatgcagggctctctctcccagggagggagtgctaagtgagtacattaaaaatgaatctgctgccccatttgtcgactgcgagaaaacccgagtcagggacatcaatggattattattgattgttgtaagatccaataaaatcataaatatggctcaaaacaattactgtggccacattagcaaattatcaaatccataacttgctttggagcccggcctcagagatttaaataaagtgccggagggaggcaagttgtgttttaggaatgtgacaaccagggctgagatagagaaatttatgatttaatttgccgtgcagtctaattgcgaataactattggatttctaaatagtggactttgattaggtttaggtgtcagaaataaactggaaatatgggtcagtttatacttctctgagagtctgtagggaaggggacaggaaggtattcattgcaaggaatgactttctcaggtgaccttccacccttccctctgtgtccttatttcctgtgttggaataattggattatacctgagactggctggctctttccagagaaccacttgttactttcttcaccaagtgtcagtttccccccatttagaaataaatcaattcaaaatgaaattacccgaagcattcatttttcaccatctagtaaatgaatctctctaaagaacacgaggtcctccctttttggttcaggcttcataaaatccctcttttcagtggaagtggtatagtactagtgtctctgccttttctaggcttttcctctctggtggcttactaggcaatatttgctccataaaatgtgtattggcatgttcatagattcctgggcatattttgtgaagatctaacctgaagtcgggctgcctggtttaaatttctaacccgcagcaggctggaaaaaagcctctcatggcattgcatcatccattagccactgtagcccttcatctgcggccctggcctcagctgcactctgatgacaagcacaccggtggctagattttcaggagtcgattggctcatctttcagctcactttaggaaaatagaaaagcaatttgcacaaagataaagcagatttcatagtgatctgtgtagaagtggctaacagatttctacgggcagtcagcgaaagcatgaaaacccagctgagaaatgataaattactgctaactgtcctaattatcccttgataccctgtgttgaaacctgactaaattttgctgaaacttacaaatagggaagaaatttaaggtttaataaattatacgtaatagaaatgcttaaaaaataaaagatagccacagcagaagggcttatatttatcaccccactgtctcctgagccttataaaaaggtgggggtagaggggggtgttagataaattgcaattttaattgcaaacctaattgattatactcagcatgctcattaggtcaaggaagactatgagtcagctcccaaggtcattacattactagagtaagcatgtaatttgtgataagttgatttgtgaacatcacattcttctctttaaacagaataaccaacattagtttttaaggttcacatactgacaatgtgtgtttctttgtattttaggacaatcatcttgtactaacccatcttttggttttatagttttagctttagtgcttttaacatataaatgcatttcaaattcctccagcaacgactaacattttaccagctgtcttattccattgttgaataaccccagctataatagtttgctttttcatttcctttctttctttttattattgtgaaccaacactttgcttctctgaaatatttaccttgtggtcctctttcagacttctctggcaatttggattgattctctatttcttcttctacctagaaactttgtagaagttgaaagaaaatgtgttactttccctttaaagaatcatcaatgcctttggctgtgtacatggcatgatttttatccctttcccaaactggttcctcccatctcagggttctctatttggtgactgttctcttttaaacgtgttgcctagaatcacatgagggcatccagatggtataggaacaagtatttattgcggtacttagaatatagtaggctctcaataaatgctttttgaacatgagcatggtttcaccaagtatagagcctcaggtctggacattcttattgcagatgaagtttgcagaatgtgaaatggtcagaaggatcttgtttgtaggcactgtcataatgaggattttgttggttctttttcatattttgaagagcagtgaatctgatgagtgatacaggggttctgtcatttcactatcctcaggaccatctggtcagcaatagaatggcttctcaatctcattgtggacaaatgctagcaatggaatacattctcaattacttttcttcgttaagtaatgatctatgtgggtgctttccatacctaaggtgtttgactattctcatgtctaatacccaccaggctttcatgctaatcatttttctttcagtaggcatacaaagggtgtctggagccctttggactctttggggatgagaattagaagcataactttaattaaaagcagctaagtcattaaattttgtgggctgggaggaccatagaatctttcaagtattcgaaagctgcagactttttccatggaaaaattcacatacacacaaaatgtcgcatttaatttcaggggcctcctattcccctgaggcttacccatggactgctagactgaatttccctgacttgttatcttccaactaaatagtcagggaagattgtattttttgcctaaattgatggggtgaatcttgaggcaagtcacaaagccacattctacccatgtttgcaaaatgtctctctcactcatgggaaatgcatgctttaagtatttaaatctgatgctgtccactgttagctatttgcatgtgtttccttggttgcaaaattggaataataataccccctgctgttaggattttgtgagtattaaataagagcacgaatggggaggtctctgcttagtgcttagcacacatcgtctttattcaccagttttgttttgtttttttgagaacctactacatgcccacttcaatttctgtgatgaaaacactggacaaagccagtgtcatcctggccctcaaaaagaacatcatctcactctcttcttcttcatctatagtagttttggcctcacccctgtgtgaaggaaaggctgatcagagagtccgaggaaaaccctggagaagagatgaaatggatttcagtttagtgtcagtccccttttaatgggcccagacttactaatgttgagcagattggtttcctaagctatctaagcaagtgagtcaaatgaaatggaacgtgccgagttggttctttatgttgaagactgaggtatacccggtgctgtgtgtggtttaggtatgtgtggtttagggtgggaggaggagattccctccagatccacagtttttctccaaagcatggtgcctaagatgtgctttcaccatcaaggagcattatgttactttataccttacatcatggattttttaagtggataatagcataatttaaaaaatattaccatcatagctgaaataaaacattactctggtgttaagtttacaataacagaaagtgagttttttcttaacctctgaagaccagatgtgttgataagccaagctctcagttcacaagaactcattccaattagttgttgaagtttaattacctcctcaagagactaagtttgactttaagttagagttaagacacttgagaggtgaaagctaggagttgggattcaagggttaagtttagagttaagaaagttgaatcttcagttagattcaagagagctaagttggagatagagttagaattgaatttgaagttaacttttaaatttgataaggttttgttctgttgttttttttttctaaatgcctacatcagattttctttgtaatttccggttgcagcagcagatttgtactatcctggacaagattgtcagaagggatgaacagaggtgagaacattcagagctcagacatacccagaccctcattgggtgggaagtttccctagctaagttggagatcgatggttctttgctgctctagcagagcctctctcctttcgtacccacaacaatccccaccaccaccttcttatactgacccacaagaacatttgttaggcaaacactctgccatctgttgtgcagacagggcttccaggcagaatagaaacaggtgtggcgtcaaagtaacttagtgcatagacaaggtgaaaggagggcttaaaaattgcatgtcacgttctgagctttatacctccttggcccatggtgggtggacctgaaatgccatgtcttatcaatggcgaccctttgtaaccagtttgggctttggatttggtaccacacagctttatggaaagacacttggggccgtcattttacttgcaaatagaaacaggctttgtggtgtgatttcttccctgggatttgttttgaatgtgtggctggtttgcagtccccacagaggttgtcagctaatgagggcagtggaagtacgttccttaacttgttctttcagaagtgttgcattaccagagctgcaagaagagtttgttcctattgtcagatgcggcatgggatttttttctttttgccttttcaaattccagggaagaatgagttctttggcagaaatggtgtcaagagaacttcttctgtgattatgtgctaatgcagttctaattgtttctctgcagatggattgagtattgctgacagaggtttatgcaccttccctaaacgggttggtggttacctgctttttacaataaatgtaatgagcatctatttgcattgatggtaacagtactttacagtggcttaatattttgcagtttgtgaagatttttgtgtcacatggcttatcttatttttgtaaggcagtattctgggagtaatgctttgtaacccacaatgccagtgttcaaatattgctctgcttcttcctagctctgtgatcctggacaagttatttaacatctctgagcttcactttcctcatctgtaaaagagacataatgatggtgcttggtgtcatagagtagttatgagaatagtaagagttaagggaggtatgggacttatcacagtgcctagaatatggtataactcagtgcatgttagctattatttaattattaacactatcaatattattaattttccccagcattgagtgaggtagctatggtgccaggaattttatccccatgttaaagatgaggttaactgaggttcagagggaagcagtgacttgctcaagacctagaatccagtcagaggcagagttgaacaggaactgagaccccgttacacctccaacatcaagaaaatgttgggggagtcctagtgaaatcagctcccacaggctggttttggtggcgccggcctcatcagaaagtgggtaataacctcagctcccagcagcaacttttaaaccacatttaattgtctgtggagaacaggatctggaagtcttcatttgagagaagacaccttctctcaggtagggttttgtaaactgggaaggtagagaggctgtttgccaattggggtttgaggtttcgtaaattctcccatcctcaggctgaatgaacacctctcttaaatgagaaatgcattctacactcacattggtgttattttagagtacccataccactgttttaatacagtccagggataaccagttttctctgtaaaacacatgttgattacttgctttgtaggatgttgttacaagctccaggtgaagaaggtgtgtgagactcagtacctctctttccggggttgcaattctgtaggaagagcaggaaactaacatagataaccagaaataggaggcaacatgtcgtaacgaccaaggagtgagttgaagatgaaaagcaaacaccatggattttggtggttaaagaaatttcccggatgtaagaaaactttcttacctattgaagttgttctaccagaagagaaaagggagatggcctaagtgaaatattggagaggcaggaaccattagtaggatgagatatgtttgtttttagtttgtagaaaattatcatttcattaacgacctggacttcttacgggtagaataactaaatccattgtttaaagaaaaatatcatcagtttgaataaagttggcaagtgtgtggtagattcatttcattgtagccagaagcattttcagtcctgtcttcatatctggaacctgagtctttacactgacactgttgcgagggtgtgatggtgactttcacgtgttctctctgttctgtgactaagctgcatgtcaatgtctgtggcacagatgacagctgtatcctctgccttacttctgctgttctctgcacaaagcactattgaaaccaagaaaattaaggaggcacaaagcaggatctcttatgggaaaaactctaatcaatatttagtagaaatcaggtactccgaattcaaagatgaaatactagtttttgccttatgttttgatcatcagctgtttgatccagtctctgggagtaatgtatttgtagcaggtttctgaaaatcctgatgtgttgttggtatacgcttctaaagatgcgctaatagggaaatactttggatttagtgaagactgtacttatcggtccaattgaaatatcctacaaattgattttagcattagtatttatttaaattaaaacgggcatctatagaccccttgggcagcttaattgtaaaagtaattcttaaatgtactacgccaggaaaacaatataagttactcaggacaaatatatgtcttaaacctgcgggagcttgatggcaggtcacttctcatttggttaggtttaaagtaacaatgtgtggcaatgagtaatagtactaatttctgaagggaagtagtaggggaaagagtcttgggctctgggcttcatgttctatattcttatccaatactgtttagttctacagccttggacaaatctttcattgttttcttcctctgtttcgttttacttcatttttatgttcctctcttcctcatctcctcttccctgcatacgttaaagactctttcagttgcaagtgtcagaaaacccaaactggctacagtaaatggatgatttattgggtcacataattaaagagttcaagggaagtttctgacttcaggtatggcttgatccagggactcaagactctgtgtttctctctccctctgtgtttctctttctctgcaaagggactggcatgagcctaggtataaaggtggcagtagtgagttgagcatcttggccgacatatggctgtgtgaagaggatcagggagacaacgactgttgagcagttgcagggtctgagcataaaaagattcaggagccagggtctgctctcggaatttgactcagaaagcattcaggactgatggaaggaaggaagaagggactaagatgaaaagaaagatgcttcctagagaataacccgatagcaatgaataggatgagacttaagcctggggtactaatgtatctgtctgtttgggattataataacagccagggtgagacaagtgaaattagaaggacgtgataaatacaagttgaatacaagaccccactggctaaagaagtgctgtggaacccagtagaactagatgtctatcaggatcatttacattgcaggccaaaacaagtcaaacacacacagcaaatacttgacaaaatacctttctacctggagaagatcttagtcttttttctaaataccaaaatatcactaaaagtctatatggtattgggtttactgtgtaaatttacattcacaaaggctgtgattttctgtttgcaaagtcagacactactatacaatgtcattaatccattcattattcactgagcacctgctgagtaacacccactgtcacacatggcctaattctgcttctcgctaaataaaacagatgtggcccttgatctcatggagctggtagtctgctgaagtgtgtcaatcctcaagtttacccacaatacctcatctggatgtttaaggtttgaactcacggaaggaatgttgtctctaggatagacaactggaaaatgtaattgataaccctgttcaactctagagtccttctttccacattactatgtgtttatgaattataaaaaattatttcctggaatcttttgttcttgatttatggcaaaagctctataatgactatttttaaaatgacttaatgagtgagcagtcttgcctctgttctaaaatgccagtagatcacttaagtgtcatttgttaaaccactttggtcaataaaaaccctctcattgtttttccccaagtggttattgagccacatcacaccaacctagttctttgctcatgttgctctatctacttttggctggtgtggattattattaattatttcttcacagaatactagccaagagttatcatgatgcagtaatggtaaatgctcacaaagataaaatgccctaattagggagccaagttaaggagtaagcagtttgcaaagtggattgagatctggtgagagcgggttcccctcatctgcttccatatgatttgaaatgccaactgcttgcttaatttagaacaatatactttctctaaatgtatttttaagattcatgtttattcctttaatagctgatttaaatgaaccagcaactgatacaaatccacaggaaaaagaattagaattgctaccgattgaggccaacatggtgcttggcactgaaaacattcagatcattcccctcactctcatcatgccaaatagtgccctgtgagcaaacacagatctcactggggatattttcatagtttcttttctgattacagagatgatactcgctcattacagatacttttcgaaaatacataaaaatataatgcaggaaattacaatcatccatggttaaatttatatttatattttagctgatggtctttttaaaaactaccaccagatacaaaaaggcttcataaagtatgaggtctcctattacttcccactaaaggttaaaaacaacagcagcataaaaataaggctttgctgagtttgtcttctcatccgtctcttgactctttcttctactttgtactagaaataaagttctctgtggaggaagagtggggaggaacccctgctactggaaagtaatcctctttatctgtctgtctatctccgatatttgtggagaggagtatgtctttttgatataatggaatctgggcagatgaacacaatttgtttacaatcaatcaatgtggaaatttacaggggaagggaggtcagggtgatggggaggaagcttcacgttccctgagaatgactccctatgaagacacccaactcaatgcagatgttcttcttgtagaagggacataatgagatctgctctcttcctgttacttaggtatagattgtagaatgtgattgttttgcaaaatagaacgttctttatactgtgttttatatctcagactctaacatgcccagccctcagagaccctgtgccatggtgaggtagttatttggaaagcctcttgtcttcccatggtcacttctgaactcattgttggagtgaatgttaacctgagtgtgaaagagcaagcagtgtctcactttaagtagaactaaagctggggccttgctttgttccctaggtgctggccgagggttggaatgaaagtcctaatgtgtgggggaagtcagccatctcattccctctgaagctaaactgacctagtgaaaaggctgtctccatattctcaaaggtttccaggaactcaagagctcagtttcctcatatgctaaagtgagggcagaggagcctggcttgaaatgagaatatctgcctttcccgaaaggaaatttgtctgccattggaagccagataaaatcactgttcatctattttttccaatttccaggtacttcagattggctccccttcccagaacctctttaaagcctgagtctaatggccagacctccatcatccctaccccaaactgctcctcaatgtgcataatctagagaatctaaaaaatacttagagcattcatttgtattcattgagctgaaattgtgcatgctgtcagcataggtgggagaatctgtcttagagtagctcagcaaatactacctgtcctttactttcagagctttgcccctgtttcctcctgctcgaggccctaactgcattcccctatcttggagggcttgtcctacttcctacttacttaacctctgcttctgctgaagcccttggctcagggaccacccccacagggaagtcgtccttgatccttcgggtgtttgctcctttattttgagatccttatctcagtttgaaacccttaggcacaagtgtgatgatttgattaaaatccttcaccaggagactgtaagctcatgagaacaggggacatgtgtatccccactgcttagaggagcgccagatacacagaaagaactcagaaaatacctgagtgaataaatgaatgggtgaatgaatgaatagatggatgaatgaatgagtgaatggatgaatgagatactgtgattataatgttcaggtaaaagtctatttatttaaaaagaaaatgtttacaattttgctttattcgatcatgttacacataaaccaacaatagactccaccagggcataagaggtgagagaaataccaaacaaagaaatatcaaagagagatgcgagagtaagtcacgaagcttcctaaatttttaatcctacttttaaaaggtaaaatcagatattttatcaggttgtttgtgcatttttaacgaagttaactttggaatattcagcactgaaggtgacctgcagtatctcttgctcaattttggaggctgcctgagaatttctcattctctgttgcttccagatttccaggaagagtcagagcctcacactttttacttgaaaagctgatacgcattccctataaacctcccaaatgtgtgaaataattacccaggaaacaaaagagagggacttttacagtcataaattcattcaaggatctacatgaggcatttttctgtagtgggtcaggttacatcttgttccccttttcaaaatatatttcaagctatgttactaaaatgtacctaaggcttcttgatataggaaatagaaaaataagactttagatggggcagacatctctagtaccccaagtctttctttccttgaaatatcccttcactttgaaaaacataagtaggccatgtagggaaatgcctaatgtgaatttctcctaatagccccaaactcttctttcaaattactacaaaaggaattcaggatttttagtgccagattgatgaaaaaaaagtgcatattaagctttccttattaattaaaggcagagaggaaagagtcagcctcgctcaaatttataaaaacaaataatgtttggaaatgagcttacagtataaaactgggtgatgctgtgtcttaatacagtttgccttcatgttagatatcattgccatgacgtgttaaaacatctaattactggtgtgctgcaagaaagaggaaaatgacaagattgtgaatgtgatttcaagttggacttgggaaaccattcaagaaaactctttagagaaacacatttgcttttgtcccatgagacacacacgatgaactaatagatcatccttggctctaatttctaaccgtgttcacagccaagctcatttataccaggtgaatgatgatctggctcatcacaagaaatagctagtatgatgaaaacttttacagagtttcaggaaaagcagtcctaaataaataaataaatatatataggatttcctatagaaaaaatatataaatatatatttttatgtctatattatttatataattatatattttatatctatataaaatatatagattttttatatcttcatatctatatataatatagatatatatagatatattttatatttttatatattttatatattttatatttttatttttttattttttaatatatataaaatataaaatatttttctatagtaaatcctatacatatatacatatatgtatataaatcctatacatacgtacatatatttttaatatataatataaaatatataaatatataaaaatatgaaatatttttctatagtaaatcctatacatatatacacatatatacgtatatgttttaatatataatacaaaatatatttatattatatatttatataaatatatttatatttatatatttatataaatatatttatataaatatataatataaatatatttatattatatatttatatatttatataaatatatttatattatatatttatatatttatataaatatatttatatttatatatgtatatatttatataaatatatttatattttggactactttctcatacccagagccctttggagtccaagggagatccaatcacagacttctgggtgatatagcaaagggaataactgtttgagaagtaagggcacaagaaggaaaaatcgagttggagaaaagacagtatttggaatcttaatccttctttgtacatgtggtgtttcttaactatccttccaaagggggtgccgttgaattttatttggacagtttactcctactgagagcttctcagttatcttaaggatgtgggaaattctttttcttctttccttgtttttggaaagaatgagtctgtctgagttttcccaagaaagttagctgctacagtttcagggtgggcagccataaagtgtgaaccgctattgatagtgcttttttctttttgccgttataatatgcttaaaatggagtattccttgacatgtgcagaccgcaaaggaagtgatacttggttcagagttttttttcttcctctcattccttcccccatcctttctctgctctcctcttcctcttttttttctctctctctgtttgtgagaggggagtatagtactgaggggaccaggctctataaatgtatcctaagtgtcaagtaggtttcatttccagtacccagttctggaaggccagtcatgactgagtggacacctgcgctgtgacggattctaaggttcagcctaggctcagtgtgaaagtgagaggtgatcaattaataatgtctcttaagggcatgtgccacatatatttgctcaccctgctttaagacagacaggactcatcccaattctcacagatttttaattttctgtttaagtctttagtgaaattgagtactcacagctaagcggagctggacttgtgaagttgtactcattgccctgagatgggaaatgccaaatggtaaagataatcagcacagataaaattaccttttagcaaattctaaattatgtacatagatgttcaagattcaatgtaaaattgctttacttacttacactttattttttggaatagggataactggtccttagaccacgtagtttgttactttctatacaagtgtaatggtttattgaaagcaacacctgataatactctaaggttttacaaataaccccctatgtctggagttttggcaaatactctgccttaccctgccagtgcagataaaatggaattctgtggcatttggaaggcggagcattctgtgtttgtaatggagatcatttgggctctgcagggcacatttgaagtcactgatgccagttcaatccccagatgggcaaattaactttagtcctttccatgtccagaagctgcatgccccactcaactgtcaagagttagagcaggcaactctgcagtgcctctggacacaagccaccacagagaagatgtccctgaagagtttcctaaacaaaatgtaactcactgtcctacgatgggaactctcccacttttccaatacctatctgagattccatttctgattcaggttcattactggatcatagacctcaacacacctggcttagtaatggtgaagcccaatactgctgaccctgctgctactcttaagattagggaccacatttgaagttgctgttgtgaagaggattatgacatgtagcccctggaatctgcccctgccccgcccagttgtgctgggtattaaataagacaataatctttgttttgtccctcagtgtatgcccatcatctagaagaaaactcaaacttaataggagcttggtaagtatttgaataaatgaaggcacattttcataagtgtgtgttactggtattagccaaggctgtgtgccttggttccattctctgggactcacccttctcatatgtgctaaggttattctatttcacatgccttttactctgcactctggggctttctcttgctggtgtagagtgtaggcctaaagtgtcaggaattattgactttaggaacaatgtttagccaataccagtgggaatttgaggataaattccccagcttcctatgtcgtaagtgcgaaaactcagagggtagcatgttccacgctgtcttccagagccccccccagtggatttgagccccaattgcttgaagcactaatattcttataaatgtttcttgtagtagatttcttttttcccctgtcttacttccacttctcccctaatggtgcttcctgggcccatctctcaaataatccatttgtactcagattcctgtctcatgatcagttctggagaaattcagtctaaggcattaatgataataaagcagtaaagagaaagaatatgaggttcagcatatctcctgctactactgggaaaacagtctggtgcagcatgcccaattctcagtgactgagtttcaccttggaatattagggatagtgtgctacttagtaagaggcaagagtattattcacaggaaagttaagtaacattgatcttctaggaattctaatacaatttagacttggttataattcgtaaatatatgttctttgccctatcacttcagtacgtagaggctcttgtttttggtctatgcagcaactcttcctccctcatgactggattaattatagttactcaatcccctttggccacaggggtaatacaggaatggagacttgaccaaatcaggtccctgtctttgctaatatagggattttctggtactaatggggcaatcctctcattcttctctgattactaggttgggagcttcctgaggccaccttccacagccaggttgtcatctttattctgagagaatgaagccaacactggagagggaaaggactatacattagtccgccttatctaaagggaatacattctaagaccccagcggatgcctaaaactgcagatggtaccaaattctgtttgtactgttttttcctatatgtacatagttacgatgaagtttaatttataaattagacacagtaagagatcaattactactaataaaatagtacaactataccaatatattgtagtacaaagttaataattgtggtctttttcttgctctcagaatattgtactctagtcacttattttcaggccatagttgattgtaggcaacttgaaaccatagaaagtaaaactgccaataggaaggtaggactgtactggttctgccttaacattcctgaggatgtgtttatgtgaaccaataaatataccccttctttttgttccaaaagagtcctgacctgctgggagtggtggcacatacctctaatcccagcactttgggagactgaggtgggccgactgcttgagctcaggagtttgaggccagcctgggcaacgtagccaaaccccatgtctacaaaaaatacaaatattagctgggcatggtggcacatgcctctagtcccagctacttggaagactgaggtgggaggatcgcttgagccagggaggtgggggttgcagtgagctgagatagtggcattgtgctccagcctgggcaacagaatgaaaaaaaaaatcaaaaaaagaatcctggctaatgcacgatgcataggacttcatcttttccttgctagaatctctaatttacaaatagaaaactttggatttagtaattatgccagtaatgtgtagaagccacggagatgtctcagaatcccagttccaagacagtagggactggggctgatgtgctggtctaggcctgctccctttttttatctattggtacctaataaacatgatgctgtttgatgacctaattacattgtgttaacacatttgtagttagccacaagcacttaacctagctcagaacttcatccctttctgcaagtacggcatataccggaaattgagcacagaaatcttaaagcagattaaagagggcaaaaattcattgtgaaatattcccaaagtaaagttagttattacacttgatcttagctggaaggccaaaaagtgatcacagttagttattgataatatacttcactttaggtgaattggtttgtgctagctttgcagcctttgaaaaccctgtgggactggcatcccatttcctctggatactgcttataaaaccacaaattaattttttttttcttctgtgatttcacttgacactggaatctcaaaagtttcttgggggattttttgttgccccaaaagctacaattaaaagacagattttcataccttctttttccacttaaacaaccatcttcagggatgttattttgtgtttatttaaatattcaaataggattcataagccccatcttcctcactctcatcttcacaagctaaggcagtgcttgagaaaagagaccatacatcactatttattcagctaatgtaacgcgaagagctctgtttgaatagtctatttatctcttcatgttgtcactagagagaggtaagactagccagtgcttagtggtcaaagaatacctgttcagaaagaagtgaagtcaactgatttttaataccagatcaataattttttttttctttttgctgaccctggcagcaaaaaggagtggcagtagtgtaaactgataccttgaatcctgtgggatatttttgttctctatcataaaatataattttaaattaaccacatcagactttttcttgaattccagaaaatgattaatatcgattccagagctgaaaggcttttgtgtgcatttcaggttaatttggcatatttgcctcatttcacattaaatgttttatgtgtgtttaacttctctatttgaccatttagcattcgagagactccataagaactgttaattatcaagggcatctctctgcgttaatgtgcgggcaccgtggtatgttctttactctgaggctgaggaaatgtgggctggatgtcaggtgctgtgatgttatctataggttcggtaatgtggccaggcactgccactgtgggaatctgtgtgtaatgaacaaatttttcacgtccccactgatggcctacatttttgcagcaggaaatcagagagcacagttcaagggcagcaatagaatttggatattgaatttgtcacagaagcaatggcccattttcagaaggccctttgccttatgaaaccagctaatcagctagaaacatagggattactctgaaacttagacaagacaggacagcgttcagttcttcctcatacaggggcattccaagtgtggaaattttaatcctttgagttaaaatttaaaaaaaatgtgtctggattcaggaataatctaaagcatagtattcttctaaactccatttccatgagatgctctaagaaggtttttgtaataaatccattttactttgcataatgaaatatttttcaaacttatttctccatggacccagtgttttttttgttggtggtgggttttttgtggttgttgtttataatagtgaataaccactaaaatcttcagatgctttgtctatagatacttttgggtaacataactacaaaggttgtcaagagaaactaatgttattttcacattggcagaatttcatgttcatagttaggattataattaattttaggacacattgtaaattatgaaaacagtggtttagttcatttgggatgctctaaggtaataccacaaactgggtggcttataaacgaccaacatttttttctcacattcttgaggctgggaagttcaagatcaagacactggcagctttgttgtctggtgaatgcccactttctggttcatagatgctatcttctccctgtgtcctcacatggtggaagggatggggcagtggtgggaaacagccccttgcctccttgtgggacaagctatccttggcctggccatggcttctccaggctgaacttgagtcacacttgggatgacttacacagctttgtgatccaggagctccactagtttgaagctcttctctgctatcatcccatccatcttatatagacaaaccccgtaaaattccaaagtccggttagaaactgtagaatgagggctaattataacaacctatagctaaagccagagacattataccttcaggaactgggcaaaactggggactcttgaagaacatagatacatagttttgaagtatgaagaatatagatgcacacttttgtgtgttatttttaagagttcaaggaatccttgttgtccattcagccaccttcctctggcctgaagtgagtatctgccttacagttggcagagatgaggaattaacattcatgccaatgcccaaatttgtgatgatcatgaagagctggaaaggtgagttaatttagtgagttagcttcagtttctttagatagtgtcaaacttaatgtgtaagagggagagggggaaaagagcaatgtaagcttaagtggtgttttagaatatcttttcactggggaaagaaaattgacaaaagattcaaatttgttaaattaggaagaaaagtcaatatggtgtatttgccatctgtcagacacattaagtcttctctgtcgaacagtgttgtcagctgaccttattatgctgggaaggactggagaagagctactgtttcatctcccagatttcctcagtctcccattaagaaagtgctgaatttaattctcatttctgttgctttttatgtggcaggatggtgacgctcagtttcacagtttctttcttttcgaaaacatgtactcttgtcacacgggcttactcatttatgggcagggtgggagtatagcgaccaaaccccttcttatttatccagtaaagcaccacagccccaccatatcttagtgtagagtttcaatgtgccccattgataggaatgttccatgacagcgtacacgttctaaatgggcttaaccaataatttcttacccctgcctgagatgtttctatttaaaaaagattttgggatccataagaaaaaaaatgtccccaagggattctctaaaattgtttattctcatagctggtgttttgcaaaatgctttcctctcccaagtctgtcaagtaatttttataaggtctccactctagacattcccaactaagtatcttgttttccctgaatcttggagatggaaacacatgcaaaatatgtgataagaaagcaatgagggcaatgctgagttataaaaaatatctctgactttgaggagttaggtataaatgcactaactgtacaaacaacctgtgaatctaaaattctgccatgcttctgtagttcttgaggaccacaagaccaaggttggaatttccctggctgcttctgagagctgatttgaaagtctgggtggcccctggctctgtgctctctcagcctcagtgtgacatttttaggcacacatgttaaaacagtcttcagatgttcaataggaaaccaacacaatgtcagaaagaatagcaccctaacaatttcacagaatggtttgcttatgtctgtctgctgaattcctaagcctccagatgcagagggaagtattcagttagttgtctgttaggttcacactcacttttcactacccttgccccccataatttggaaacttgacacattgtcttttgaagaacagagtctgggaagcagtaacctggtgtactggttggaatatagtctcacaaatatccagaccattgagttttagcctttttttaaggtcccagatcccatttcttagatcgaaagcttctcaaataggtttctgtatgggctttggggagctgggcaggagggacactttcaacctccaaaattactgaaaaactattggataggcatatgcacatagttttgcagtaattttggaggttgcaaagagtccctcctcagcagctccccaaagccccgttgtttctaaacttctacttagatacttgtatgggttgtttcagataacagagtagaaatgctgagaggtaaagagatggccactagctagttaattagctgtttaactattccagcctctaatatttatagtaaggcatttaataatatttaaaatatttacatcatgggtataactaattatacatgagtgattttgggactctaaagcgtagtaatattgtagatatctcatggtttattttccatttcaggaagaaataacgtactttaaattttaaataaggttgtaattggcatgtaaggtggccctctcagcacagctttatgacaggccttcttgaaatttgctggccaagaccacaaactttagcgagtaaaaacatacaggctttggaatttgagtccaaattgcaagttattagccatgcaactggagtaagttactttgcctgttttaggcctcagtttcctcaagtattattgctaatttctttaaactgaaattagcaataatacttacccacaggtttattatgaggatgaactgagattgtacatgacagcccatacatagcatagtgtttggcacatagtaaatgcttgctaaatgcatttattaacactgtactcttgtctgatgagagtcttcacaaacaacttcatgactgtctttcgtctaagaaagagtgatactaaaacaaagcatgagaaatggaccaccaacttctgaatattccaaatatcactctctttcttttaatgtgtctatcatttaataggcagggtaactagaactatcagaaatttgtccttggtttatttggcttttttgtgtttaagtcttttgtcctggagctacagatagataattataaattcattcaatcctggcatgagagaatctctttgctttagattttttaaggggaactatggacaggaatagtttcaaattccgcttttaattgttagacgaaacaatgactgcaacgcggctgactctatcaaaatgtaaagttaaatcagggttacttgttcagtcttgacacaaagattcctgtcattgtgtgtgataacctcttcgaggcttgtaaacttaaatacgtttatttctcattaccctttttgctattattgtggccaatggtggattcttctactagggttgtacatcagtgctggtttggcaggctggatttattttaaagaaacgcttcagggatgcctacttttccaccaaaaatcaatcaaaatgttgtgaagggagcataaattgtagtcatctttgctaggagagccttccaagtagcttgaaaagaggccttgatagatggaagcaaccgcaggctggagtctgggggacttgcctagtggctaagtcaggaccatcagcagatgtatgatattgggaaaaacacttttattttatctgggactcagttgtgctatctataaaatgagagagtagaaaatgcattctaagatcttaatgtcttttggttcccgggccctctctgatcagctaaggaagggtatatccaagctctatggataaaagcacattccaagataatttcaccagttttcactgtcccccactgcctgatccacccacccagagaccccaaccccaaccaggtggtgtgcagcatctcaattaaaagcccttcaccattagatgtgtcttcaagccatgcctagttccaaaataaccttggagatatcttgcattctcgttctcttgcttgagttctctgacctctgagggtcaggatgtctttgttgtataagtttatgagcacgatgaaggaggaggagatattatttcacttgacatttgaaacaactggcctttgagtctaaactgaatatcatctcccttgtaagtatttctaggggaagcctagatatttggaaagtgctaaggcaaatatcgatttgatttaggtagatttcaagcatcaaatgtggtggttggttgtggtaggtagggctgcgtgagaggctggggcgtgtgcctggagatgttaaatattagaatttcacccctttttctttttctctttcttcattctctttccttatgacccctccatgacataggtggtgggctggcctttgtctgattcttaagacaaagtttctaaagaaactttgacttattttcataaagtacttaattatttgaggtgttatttgtttgtttgtttgtttgtgttttttgtatttgaaaagtatgctgatttgcccaagacattaagaatgatagttgctgattgttaacttcctttagcgggtatttttggatttgcttataccatatattattctcttctggggagtcagggcagggaagagaaagaacttcgattttatctaaagcatttgctcagccaggttgaatgctacttctgtttatgtgattattgaaagcttcctttaccccccagacagcatccagtacttgttgggagccatctcattttatcttcatggcaaccctatgggataagatgcagttagtttcctcattttgcaaatgaagaaattaagggtcagtccaaggtcactaagcttataagtgattgagttgtgtctgaacccaagtccttcagagtagagaacttaaactctcactaatcacctaggttgtctgggagcattctagtacaggggaggaactggagaccttactctctgtgacggtaaaggaagtggagccagataatcagaaatctaggtcatgtaggttggattcctagtccaatctgttaggtcctacctcactctttggcttactacagttcgttgccagttctagatctgctataagaagtgtctattctggacctaccaggctcccacatgctcacagaacccaccttaaccaagttctccaggatgagtctttttatttctaggctagtatctcttgattcttcctgtaacgcttcttactcttccttctctcctgctctctttctctaatgtttttttaaccatttgtaacattttgcaacttcaagcagaagcattctctgtaccgtcaattgtagaaagagaatgataatagttcctacctttattttaatagttaataattataaaaataatagaaagaaaataaaaataatggctaacatttgttgtttagttactgtgtggccaggaactatgcaaagcatcttacagtatatttataatctcattacatttcatagtagcccttttatgtagtgtcctttttatcatctcccttttagaggtagccacttgggacacagagagtttaagagacttgcccaagataaacacttcataaggtttgggacttaggttatctcactctgaggcccaagcttttggctattcatttatgttgccttcttctaattcatggaaagcgaaaggaacagtgcctagcaaatgccaagaatctcattcatttgccagcaaataatctcagagagaatcccctgtatcctagcttcttgggatacagtaatgaataaaactgataaaaatctctgtcttcttagtttgcattttggttgaggggaatgagggcccacaaaaaaataagtaaaatatgcacatgttaagtggcgattagtgcaatgaagaaaagtaaagctagaacagggactagagaaggctgggcattggcactgaatataagtaaaattatttgtaatgaatagccgtggtagaatgcaacctgcttttgttgggttggtatattgaccactgataaggtctggagttggtgtagaacttttctctctactatagactcaatttccatatctcccccgacaaccttagaatattaggtagctttgcaacatgaaactggaattcacacacctaaaggcactttcagcttatagtgtgagttttgtgatttaacatttattgggcttggctgctgtgcacacagcagtcatttaggtacgtataaagttgatattctctgcccgcaaacatggttgcctttacatagactcatccttcactaggtttgctgattgtgtcactgccacttaaatgtcacagtattaagcacaaggaaatgcaagacagatgaggtagaaaataaagtctgtgtttgtttctcatgcttggtgaaggtgttttatagacactggaatagtcagtggaactaggccaggatggcctaaatacctggtgctgaagccaataggtaggtgtttaattgtagaaatgaagcatctaaccaacacatttagaagcagtgtttaaagacaaatttcaccatttttactttggaaaataagactcctggacttactgtacgaagtgaggcaaaactatgcacagaatgagaacacggcttttcttttattattcttccttctcttgggcactgtgtagcaaatcatctgtcattttggggttggggtacaacttggcctaatagacaggcaatggtaactctctggagtcataacagttccctttggcttgcctttatggccagtatagattgctaaggctatagcaattatgaggcagtccatatcagttgttgaaaacaatgccatttttgcccaagagaaccatattcttccttatatgtggcacaaactagttttgtgggttttttttttcttttctttatcccctacaaatcattgtacttgaagatgccacactacccctgtgaagtactgctgctctggtcctacttaatagtaccacaagaagaaataggaagcttttaaacattatacctgtattttcattggtggtgaacagttagttatggaacctctcctttgtgccagaaatcagtgggctgagaagaaaaatgaaacctggtctttggcccaaaataacttcaatcagcaaatatttaattgagcaactattatataaatattctcagaacttatggggatgaaatgttgaacaaaatctaacatggttcttgccatcagggaggttacaatctagtgggatagcaggaaattaataaaaaacttaaaattacatctttatgctataaagaagacatgtttgtggtaggatatcttagggaaaactggcctagttggaaagaccacaagagatcttctttaaaacatgattgaattgggttgtaagggatgaataggtgtcagtgaaggcagagacagaggttggggagggatacagcatgtgcagagggcctgtggcagaagagagaggttggtgtggtgggagcacaaggcaagagaagaccaaaaatgcaagataaggcagtaaagataatggggccaactaaagccttctaggcttcgtttgggatccaagtctctatttttaatatggtaggaaatgactgaaggccagaaacagagggaatcagaattgtgtttcaagagcgtcactatacggttaggatggaagacagattagaggaaatgcgagtggataaggcaagatgcatttggaagacagtcaagagtttaaccagaaagagaagacatgtcagtaattgccatcatgggaagcagtgagaagcaccagaattgagaaaccaagtactttaagagttagaggagggagacacaccctgtctagctgaggttcatggaagagttggtattcaactgggagggattttatcagtagaggagctgagattgagaatggggttgaggaagagataagtcaggagcaaaaatacggaagtgagggagcctgtgactgaagagcaacatgtagatcaatttgatgaaagcactaggtaggggccagcaaatactggtttgcttctgttttccagagaacctcgaggagacaaggtagaaaaccaatcccaaatgaacaggagtactactgagacctgtactgaataagacaagagaaactcagtgagctaaactagggtataagccacttgcaggagcagagcagggtcaggcattggtctgacttgctgtgaagaccttaagctgtgaactcataggacttggattccacttgtcagggagtttgattggttcagaatctggggcaggatggaacctgcaggaaaaagctgactggccccgtgtgagacaggtgacactggaggaatgaagaataggcaccctcagaggtttaggctggaggcttggtgagaatatcaaccctgacccatagagctactgaaatgtatgatactacagtgagcgccaaggataccttcccagccaaacatgccaaggaatagtctggggatggctagtgaaccaagcttcacaggtagccccagttcttcatgagagacacacttgagttgctggcaataatattcttactgtccaaggttaagtggccctatgtctcacaaggccccattcagggcttatcaagcctcttgaatattccatcaagttagtctgaaactctagagtatttactttatatgttctgaacttaacagggcacattctgtctctaatatcttggttctgagtacccatcctcactaggacactagtgccatcttgctagctggtccatgagttacataatgatggagcatctcatatgtgtagttctgtaacagtgaccaagcagtggacattcctatccattcaaggctgaacatgtgatggagcaaggcatgtctgcacagggcctagcaggaaggggttgaacccttataacttggaaactaactgaatgggagaaatgagatggaataaggcactgacgttggtgcaatttctgattatattttgttgccatttaacttgtttttactgtatgccacaccctgtggtaactcgtttcatctgcacagtgacccttgaaatgcccacagtatagacgagaaaactgaactccttagaattgacgtatcttgcccaaggtcatacaatgagtgaatggggcaacctggacatggacttcagtcttcctgagctcagagctgaccaaagactctgtctaaacttccaagacccttttctcccattggttgatgcacatggtattgaaaaatgtcgagcattctctttctctgttgaaaagttctgcctcccattagttatgaagggaatcctacagaaaggggtgagtcccttaaattcttcaattgattatgggaggttagcaaaaaaagagagtttatgaacccatgaaaccttaggttctatctatcagctgtgtcttactgaaatcacctcttgaaccaggacccttcagacatagcaattcatgtcctcagtctctggacacaatggaatcctcattataaggccttccacacaaagataataatagtggtgcctctcccatgtgtgttcacatttttgagaaaaaatattcttgcagctatcaaagcacctgctaatcaaagatttcgtattccctgtaatttgtttttaatcttgtaaagccgactactttcaaataggactcagagtgtcaaaggctgaaattcatttccttgaacttcatttaactgggccacagaatcattctgagagaatcatttaaattaatatgtggcattacggtgttaaaaagaaaaaaattttgtcctaattcccaatttcagagtttctccagacctccaatctgggctctgaccccataattgtgtgcagctgagctgctgacaagtccacacatattctgaagtcacattttctggctctggggctccaaggactcacaaagaggaggaatttttttttttttaatccctgcttgttccgtcaactagttcaccggttaaaccctgattgaatgtagaaattttagaaatgaaaaaaaaaaaatggctggagtgggacgtgcaggtttttgcatcccaagcattaattcgccccaagctgtgttagtgccggacgagacagcttgtatgaaaatttaggagtcccggagaacaacaataacaaaaattaacaaatggcaggatgagtagcagaagggaaaatcaagcatatgctgctcgtttgaaatgtagtttcattaaaaatcttttccattgcaccctaaaacaatctgtccttgccagataacacattggacaccaaaaggctgttccctccgcttgctttcttagttgtaagccaacccttataaaaataagaacacagctgctcgtgacaaaataaatttgtcagcttgtctttgaaaggtaaaataaccagggggaactggtgctgcttcccaccacttactgacaatagtaagcaacacccttgtgtttgtgttcagtcaacaccaatcaataaacatctgttgggatgagcattggtgcctctttacgattcattatgcttcattaggaattggttttgtcttcaagggaagaaaaaagaaatctcatgtaattaaagaatagtgtcttgtgctctcatattttcccccttaaagacctaaattcttttaaagccgttttttacagtacatttatctgtatttaaatgtaactactttaccttgaaaagaccatctgttcataaagaccatcctttttgtcttgccagaggtaaacttgggaaagaggtagtgttagctgggaactatggttaaatggaaatagatgagacttaaggcaggttagggaggttccctacccagcaaaatgatattcagttatgttctgggtggggtgaaaagaaaacacaattttctggagggagatgtgcatttgacatgacgttctttggaaatggttttatttcaaagggaggtgtacttgaaattcccaaggccagttaacttcaacgatcctttccttggacttattatagacaatttaagtggcctctgcagtatcagacatacagtaagttttgttattttactttcaagaaaatatctcgcttttgaggggctgctggaaatattagtgtagatgatgaagctgtactaaagtcaccttataggcaccatgaatttgtgcccattgagggaaatatccttaggtgaacttaacaaaatgtatctaatacacgcaagtacgcaaatgaagcataaagtagctggtaatggccccaaattatacaaaacacagttactgttcccattagtgtttgtttgtttgttttgttttgtttttaccagagccaaatttggggaactgaaaagcaaacaagcacttcagagagagcagaacactgcagaggttggggtgaaattcaagcgttaggattaatgaaacattagcatttacctttctacttaactcatattagagcccaaaatttgggggtttggggactgttttgtatggatagaagctttctttgagaaaagaaattaaggaatttcacttacagactgcaaccacatacaaatgaaggaaactgaacaattgcttagaatgtgattaatttgtatttttgaataatggaatggagattgccataggaaagaaccatgagacattcttaagcaacacagtaaatatgcgtagaacagctcagatccctttggatttagatgcagaggacttctattgttgttttccctacgagtgaaggataatttcacagagaataatgtgtttgtgcagaaaatttaatgtgtgagcaatgaacgaaacatggatttctcacatgacctagctgacctcttctttgtatatttcccaaaatatgttcattagagcagttgactgtgatgatgctcagcaaaattcgaagatgaagagaccctagtgaagaatgtgtgggaaatgttgcattcttggtctctttcctgcactgccacaggctgcattggcatctgaaaggctcccagaaatctggcagcaaataaacaactttagctttgtttaactctagcatctctcaaaagcatttgacagcaagcgcttttgttcacagagcgtgttttagcatctagcagcgttgagtgcttgtggaaacacactttggcacatgctgacctatactggtatcttctaggcttatgtaactaatggacttaatggggagtaatggattaaaagtgctgagatgccatttctgtgagtctctggggaggatagagaacttgatataaaaccacagaattaccactagaggcattgtgagaactgctggtatctgatttttggaatcgggagatgaaggtttatttcttgatggactaggcttcctgcaagagatatcttgaaggtacaactattttttttttcctttttgtgtctttttttgtttttgtttttgtttttgttttgatagcctactaaagtgagtctaaaagtgtttcttaagtagagctgagctttctgaccaccttaaagttcatataggtttctgccctttttctggccaggcctttactttatcaaaaatctacagttcatattgtgaaatcatatcgaaactgtatgatttcatcacctggagtggagagtcttggccccctgaccttggtagaggtgttctcagttaaggtcaatggtgggtacagcctaaagaaagtttgccttctaaagtcctgattatacactaaaaatgcctccctaaaaagataggtgatagttttctttacatcagtgttcctccatattggtaaaggtggaaaactgactacctacccctggtctttttgaatattactatattactcttgcttgagccctgctgtgttagatgaaaatgacatgcttcgcaaaggtattgtgagagagtatgtcatataacttgcagatatcctgattcttcttaattccttcattttccattttctaagatatcttttctccattcttttttcttttatgtttcttagtctttcttcttccttctccttttcttcattttcttcactcttttcttcctttgttcatctaatcttttcttctccatcctcccctaaagcagaattatggtagctttatatactatatgttgtattttgtagcattctttggatctactgggcttatccaacaaacatagaaactgaggtgcctttgggagccatgctggctcttcgtgaacacctttgccaagcttccaccaacccttctgaaacagtgcattttagaattttacctgccttttatcaagcttgtaaggttatagtagtcatgcactgcataaaatttcagtcaaccacagaccgcatgtatgaaggtggccctataagattataatggagctgaaaatttcctactgccttgcaatgtcgtagctgtctttacgttgtagtccattgcattattcccttgttcatagcagtgctggtgtaaacaaagctatgctgccagtcgtataaaagtatcacacgtacagttatgttcagtacataatacttgataataaacgactatgttactagtttgtacccttactatactatacttttttattgttattttagagtgtatttattatttttttaaaaagataactttaaaaccgcttcaagcaggtccttcagggactattgcagaagaatgcattgttatcataggagaagacggctccatggtgagtgcccctgaaggcctttcagtgggacaagatgtggacatagaagagagtgatactgatgatcctgaccttgtgtagacctagactaatgtgtgtgtgtgtgttggtttttaacacaaaagtgtaaaaagtaaaaaataaaaggttttaaaaatagaataaagaaagaaaatatttttgtatacctgtacagtgtatttgtgttttaagctacatgttattacaaaagtcaaaaagttaagaaaattaaagttgataaagttaaaaagttccagtaagctgattaatttattacataaatttagaagattcatttagtatagcctaagtatacagtgtacagaaagtctatagaaatgtacagtaatgccccaggccttcaaattcagtcaccccttactcactgactcacccaaagcaacttccaatccaacaagctccattcatggtaagtgccctatataggaataccatatttcttatcttttataccatagttttactgtatcttttctatatttatttagatacatgaatacttatcattatgttaccattaactacagtattaagtgagtaacatgctctatacctttgtaacctaggagctgaagggtatagcatatagcctagctgtgcagagagctgtaccatctaggtttgtatgagtacactctatgatgtttgcacaagggtgaaatatactagtatacttctcagcatgtatccccattgttaagtaacacatggctagctgtagttagttcttttgataaagagatatttattcttatacagtatttagatccaggacaaccatatgtgagttgcacaggttatgccctacatgaaagtttctggctacagtgggacttggggtaaaatccagtccaagccacatgcttgggggacaagaaagaggtgctttctctcttgggtgccagcttctagtttttgcccaatgggaggttgaatactaagagtcttatttgtttgaatacctctgctttgttagaatacctctgctgtaattcttcacgggctccaaaaagcaattcagcagttttatctgcaaattctagaattatctttctctggatacctttgcatgtggccatgtttacttagatgttttcaaatcagtttatcagttttatctgccagttatttctattcatccagtctagaaaggcctttaagacggtgacatactccctagaagtctcatttcccagtctgtcttggtcatcagttctcttagcagccagtttgatttgctcttgtttgatagagccaagaggaggaaattagaagttgagttcaactttctctgtgctgatctagtttcatttgttgataaaaggattttaaatatttatagttagttttgaatatcaattctaatataaatgtatagtcatgggaatcatgtaggctagaaattgggcttaattaattctctttaaaaagttcatttcaagaatcacttgaaggttctggctaaatctaataaacctaaactccagtgctaggttagaactggcaaggtctacctctcagctttgttgaggatggaaggaagttgatcactcatggatttgttaagacaaaactctttgaatatgttatgattccaagtgattttacactctagctggaagaagacacagttctgcaagaaactaagtaattcaagttgctcaacaacaacaagaaacttgtcacctcttaaataatattttcttaaagaaactgtagaaagcaagcaagaagatatttatgtagttctgtgagatttagtatataattagatatatattgtcacatatatatgcatgtgtttaaatcagatatatctcctgagtggagtctgtatttcccatacactatattttctatgaacctccatccatatatcatacttcaagctgtgttctgctagacaatttaaagccctacaaatttagaaagtaatgttttaataaaaatgcatgctattattgattgctgtcataatataaccattgttttgctaactctctgatttacatgactgaaaactctcctataattagttatttcctaaaatttaaggataatagagcagagggccacaagtgtttgtttgtttgtttaattcctatgaacatgattttcccttgaataagactttgtgctataatagattttctcctaatgttaatatgatttatgaaactggtattgaatattttccttcaaatttatggcccgatggatatcatgctgagtttaagatgctgagcctaatgatattcacattggtggcattatattgatttgttttggtttgatatatagggcttttaaaaataataacacagaataattatacaacttgcttttttctgtttatgcacattagaattaagatttatgtgcagcatcatgaaattaattttataaatacctaagttcaaaactattgggaatgggtagagatgtatgttctcccttatttccataatgttcactatttgagcaccactatttgtctattgtgatgttgtggggtttgttgggggcatgtgataaataatttccacataatcataagacttttcctctagtggatgaaacttcccaccaaaattcttaagtcactagccttctaggtaaagtataaacccctttatttttattctatgttctggaagtgtgttaaatatcccatcacatggggtaatggatgtcaatgtactttattaactaataggtagtatggaaagttctggattaatagatgattgatactggcccacgcagcccattgttcatggggaatggaaacacatgaatgtgaatggcatgtcatatctgaaatacacccaaatttcaagctaatttcaaatgttcctttttcatacctccatgcaaaggaattttctgggtctaaaagcaattttagtataatatatttgagcctttaccctgaataatatgtaggctgtttatagagacattaaccaaaaatttaaagttattaaagataaaaaccaaattgttatgggtcagcttactttcaggttgttttatttaaaacgtcattccatgcagattcttggcattgaacgaattgaaaattttagttggttgaccacatttgttctgtttttagccagctgtgcttctgttgtataaaaacagctttactgaggtctttgccaacagataatacactgttacgatgaaaaatgtgacgttttagtgacatgcatctgtttattagtttacatccaacattttaaattgtgttctgttaatttgctgcctatgtccccatggaaactttactcatttatttattcacacgctattttaaagataagccattttccctaatttgtagtaaagctttatggattgagaattcttcttggagtcaaagagctctatcttcaaaactgggattccaccactcagtcactgaattatctttagcaagtcactctatttttctgaaacttagttacttaatttttaggaataaatgaaatcataagtatgaaagttcctgatgtgatacttggatacgtgaaacatgttaggcgctctgtgaatgttcatttttcttctcatccctatccactgaatgagattcaagttctaattctgtgatatctctttctgtctctctctctctctcctcctccttctctctctcatgtaacaaaaataaaaaacaagtgaataatttgaggaactaacggtactagcatttaacctttagaattcagacttggactttaaatgaacttgagccatgagttttcgactcaatttaaaaccagaaaatatttaagactaacaatacatttttcttttcttttattattattattattattattttttgagatggagtctcgctctgtcacccaggctggagtgcagtggtgtgatctcggctcattgcgagctccacctcctgggttcacgccattctcctgcctcagcctcccaagtagctggggactacaggtgcctgccaccatgcccagcaaatttttttttatgtgtgtgtatttttggtagagatggggtttcaccgtgttagccaggatggtctgtatctcctgacctcgtgatctgcccgctttggcctcccaaagtgctgggattacaggcatgggccactgcacctggccaatacattttgcttttcttattatacctggcttattagaaataaaatattggcaatgctgaatcctatgcaaagtgcaaactatttgcttagtgtatatatgctagaaaaattgatggattcagttgttctattattatttcatttattgtgattcttattcccacagattatgtttgtgttcttgagctagcaaatgcatgtgtgaacaattgctttaagtttgaatttaatatttaaattgcaccaagaaaatactcactgttttccatcagtttccttccaaggttagaaaagatgtttacatttaaatatctccttaacaatggaaaggaagaaagctctataaccttgtagtcaacaagcctgaggattaaaccctgtcatttaggaattcattagctgtccttttgcttaggacaataataatttatctttcctaacagactccctcccctcccaaaactacacaaatgacatatttcctctttaggccattctgcttttcagaacttttgatttatgcttagagttagcagaaataatttaaggtgattctggaaagtataggtttattgtaaatagattgtattttcttttggctctcactaaactttgaacaatgaaatgaagtagctcttaagaagaaaaaaactgagaacaggcagtataaagtattttccaagagccccatctctagttgacagcacttttgctcaaaaacagaaggctgattatattccctattttagtattccttataagctctctcaaccatatgaactggctttcaagaaaaatacgttaaagacatagttccttttgttatagatatggtcaggactggcgaattaaatgttttggttcaaaagtcttccaatggaacatctctatggtgttcatttctttaatcgaaatgaattgttttctagaatgattctgctgtattttgaggattccttgagaggctgcattgatttatttgttatatgccagacaccatgctaggcctgaggattgtaggggaaggatactactctcatgtctcttaggaagcccacagttagcctgtcataaaaaaaattgaaaaatggggtggtggctgtcaagatggccgaataggaacagctctgggctacagcttccagcgagatcaatgcagaaggcaggtgctttctgcatttccaactgaggtacctggctcatctcactgggactggttagacagtgggtgcagcccacagggggcgaggggaagcagggtggggtgtcgcctcacttgggaagcacaaggggtcagggaactccctcccctagccaagggaagccatgtgggaccgtgccttgaggaatggtgcgctccagcccagataccacgcttttcccatggtcttcacaacccacagaccaggagattccccacagatgcctacaccagtggggtcctggatttcaagcacaaaactgggtggccatttggacagacactgagctagctgcaggagttttttacccgtacatcagtggatttcagataattcaaaaggcataataaagagctataagtacagcgaaatgaagtatttttttccttatggaaccaggtgttagttaaattttagtgctcagtatctaataattaagtaattaaactcattacttggtacgtgtattgtatttacatgtccctggaagtttttgacattgggaactgcttcatctctgcatttccatttccataacggcctagcagttccagctatgaatcaatcaagcagtaagatcgaagatgagaaaaatggccctaatagctagtgttcctaacagctttgaatcctccaattagtcatggtaaatttaatccaccataaggctgaacattgggaaattctttaggcctcaaattcacgattcagtcccctcatccgcaaaccactttcggacattttggctttcacgaaatgaatgaatcaagaatcgtcttagagtctcaaagatagtccttttgagtgcactattcaaatttaatctattccttgctgggttcgctgtcaggataatttgaccatttggagtctcatgtggatcttctgaaaactagtaattggtcctctctcctcattctacaaaagttggagtggttatagggatacatagtataaaacagatatgcaaaatacttttaaaaattagaaccaagggaagtgtaattaaaaatagaagcttttattgaaacgcaagaggaagaaagatgcagatgctcataacaaaaggaagaagtgtattagaagaatatagtgattgacgagaatgtttattgctttccatgaacattgttttccaaagtaccccttctctatctatcccaaagcctcaaccatttctagctataaaactgactgtcaagataatgtctccaccccagacctcttttctgaactcctaacatgtaaaacctaactcccttttaggccactccactaggatgcccaaaaggtattccaaagtcaacaaggccaccttgtgaagttgccagccagtgagtagcaacatctatctggtcaggtcagaaatctagggattatccttgcctcctgcttcctcatcttcccaaatccaatttatcagtaagtgctttagattttaccccacaatatttcttaaatccatccatttctgctcatctctaccaccatcacctaatcaaagctaccaagtgtctctgatctgaactaagtgacctgttacaggttgctgcatctccattctgatctcaccatgctccctgtattgtttgtggtcactgaagtctgaacaatcacagttgtcccctttcttccacccactgtcttcctctctctcaaatttttcagtggtttccactgccaccctatgcaccttaatatggtccacctcctctctgcctttccaggtttttctcataccactctttccctcattgacctgctcgatgtgctctggctcatagctccttgaatactttatattcccttcctccatgaacctctacatatgttattatctccttattagttctctagccccattctttcacctgccttccacctaattaatgtcaacttgcctatcagttcagctctcaggtctcattttcttaaatctgaccctaccccaaatccagatctttgtcataggctcccattactttcctttcaagtattatctcaatttgtgattgcacagtaatgtcactgattgatgtttgtgctttcattagactgtgaacactgtgaggccaggggctttatctgttttgctcacctctgccccagtaccaagtacagagatagttacatggtaaatatctgttgacacagtgactgagtggagagatggatatatgcatggatgaatgactagatggatgaatgaatgaataacccgagtttcctgtcatgagatctcttacctcctatagtattgccacatgcttcatgctttgagttgtgagctggtatcctaaatcattaagaacatagatttcaagtcagaatattcttgctaaaatcttctacatacatttaacctccctgaacctcattttcctgtcaagtaaaggcaatcatgtctcataggggtagtgatggaaggggttaaatgaaacactctcttcttagtatcttgtcatagtaactgttcatggtgagacatctttaaagggtagctccgacaatgattgagaagcatcaaagaactggagaggaaatttggtagttctggtggtaatgatgattgtcatcactctccctatacacacagaacaggacatgggaccatttttgttgcattgttgtctggctgttgtcattatacgtgcaaggaggcctgcactcctggtacctcatctgtctatctcttgccaggggagaggaccctggaggtcattaacaaatgtgggtctccagcagtgatctcttcttgtttattatagtttagtctaattacttaagtgacagtcagcaccctggtacagcttttcaatgcctataccaaagcgacacatgattgtaatgacagaggttgctgctttgaatcctgatactgaaaactgagcctgaccactttatataagaggagaaagttgggattctcaggagatgctaacttattcatcccaactccaagagcaagagtgagggaagaggagaaaaaaggagagagtcatagaaggttggccccggaagagactttagtgacatctgtttcagagtagaaattacatagcggccatctactcatcattttgcaaccctagccaacatcattatttcaccaaggcattgtttactgtcgaccttgggcttcttaatacaaccctctaggtagctgcagctaattgaatggagttgacactcagtaaaaacctatttgctgttcctgattttgttatcttcccttacatgtgagatacctaattatagcacttcattatattttttcttcctcaggagagaatcagtctgtaagatggagagtttttttcaaaagaggaattgcctacctttctgccgtagcctatgccatttgagtgagacctcattgtgcaataatcaacttggtgattttttttatacagtccttttataggaatcatgtgtattaattccaagatctattaaaagaatcaatacacatgctgtttcttattatgagctaatagtttgctgaattagatgaagctctattactggggactgccacagaaaagatgatgcaactatcaagatatgtgccaattttgtcatgattttcaacactgcctactttccagtgacagatacatgttccagctagagaagggctttaatttgaagacagttggtagatgtggataatatggctacctatgctgaatatctaatttgagatcctgctcttgcatatggtatggtcaccttcagtggaaaaatacacatgtagctcacattcccacacagttacacacacattcaaacgtgttcaaggacatgttgattaaaacgatgaggctgttattttggaagtattaatctaatattctcatttctagttttgctgtcatgtctgagaaatatttgtttactgagtatggaaatgtctagtgttccatgttgtatagccaagagtctaccataaaacagtcaagttccaacatgtacaaattaagtaaacagaagtcatagagtagtatgtgctggctcctaaaggaaggtctcagatcttcatagctaatcacatttcacttcagtattacaggtgaaaagcactgtaagtgccactgagacatatttttctcagtgacttggtcaatgtgcattggttagatttgctcctgagatgttattacattcatcatcattatttcaggaataggagtcaacctttgtgcatacttaccttgtgctgagcactgggttgacacattcatccattcactcatcagtctttactgactgcattagtttttatggtagatataacaaaaatgctacagattaggtggtgtaaacaaaagacatttattttctcaccgttctggaggctggaagccaaagaccaaggtgtcagcagagttgatttcccctgaggcccctcttgtgagcatccagctagccaccttcttgctctatcttcacacaatcttttctctcgaatgcacacccctggtttctctttgtgtatccaaattccctctcttcttatacatacaccagacagactgaattagggcataattttaacttgatggtctcactttaacttactttcctctttaaagcccctgcctccaattaaagtcacattgagaggtactggggatgagggcttcaacataataatcacagggtcacagaactcagcctgtaaagctcagttcctcagctcctctgccaggtttccaggactgaaggaaacacagacaaagtccctgttctgtagagtgtaatttgagaggcagaaatggacaataagtctcaaaatcaatatttgatgaccaatttagattagtactaggaaataaaatggattaaaactgagggttagagtaatggagagtgctttaagcagaaacatttaagatgagaactaaaggatgatagggatttttgacaataatgtttactgagtgtttttcttctgccaggtagtagtttcagtgcttcacacattttgttttattgaatattcaccactatgtgaggtggctactgttcttatccccattttacagatgattaaagtaaggtacatagttttactaaggagattgtcttttttttatttttggagacagtcttgttctgtcaccaggctggagtgcagtggcgcgatcttggctcacggtaacctctccctcccgggttcaagcaattctcctggttcagcctcccaagtagctgggactatagatgcacaccaccaagcccagctaatgtttgtatttttagtagagatgaggtttcaccatgttggccaggatggtctcgatctcttgacctcaagatctgcccgcctcggcctcccaaagtgctgagattataggcgtgagccaccatgcccggccttttttctttttcttttttggcaaataggtcttgcttcgttgcccagactggtctcaaactcctgggctcaggtgatcctcctgggaggctgtgtgctgggattacagatgtgagccaccatgcctggccagaagactgtctttagtcacccagcccctgtcagtttgactccagagctggggcttttaaccactagattaaggaagaagagtttgctgactaaagacctgagcaacacatgtgagggccctggctctacaaaaagcatgattgttccgagtatgaaaaataggcaagtagaaatgcagccaaatgatagaagaagagagctgtgccagaggatttttgtgagtagatcctggagaagtttgaagaagtatttcaggtttcatcctttattctatgaacaagaggaagccactgatggatggaacacagagtactgggatcagtttcatttgttacacaccatggcggttgctgggcagagaactgactgtggagatacaggagtggagttaggaggtgattgccgtcattcagatgagagacagtgctggtggtagaaataaagaaaaacgtatacggttaacatatatatcacaaatgaaatttaggacctgatggcagatgttgggagagggggagaggaggtgctgtgaatgactcttagatttctggcttaagtcatggttgagtatcaataccatttaagcaggtgaggaaaaactaagtttgggaatggggcaatggagagttcagtttttgacatattgggttgagactcttctatgacttccacatggagatctcaagcaggtagtttgatatttgagtctgacaaccagcggagaagtgggagctagggatataaaagtgtgtgccagcaacatttggatggtgtgtaaagcggaggggctgaatgggttcaatgagaaaagtgtgtcgctggggaagataagaggatatagaattgagctcttgcagtttgccaacatttagaaattggatagaagaggacttggcaatggagaccgaggaacatccagaaagaaagaatagcaggaaagaaggctatcccaggagccggtgccggggtgttttggggaaggagcagcccctttgtgccagatgccactgcccagaggtctagtgagatggggacaaaaaatgtccattgagtttggcaaagtgaaggtcactgatgaccttgttaagagctgtttttgtacatgatctcactgaatctttacaactacgctgtacgatagctactgttgtttttcctatattacagttgtgaagactgagactcagtaatgggaacctagccacacagttgtaagtggatcagctcagctttcaaaagtgaagctggcttctccagggtctgaatgattcacagaaaactagcaaacagtactgctgattttgttttagttccttaaattgagatcagaagagtaggcatttaaattcaaagtgattaccttctggaacagttctgagttctcatctcatttctggccctagcatgtaagcttgggtttttggtttcttcgttttcaaaagaaaccagttggaataaaccatctccctggtccctcctagcattctgaaaccttcagtataagaaatttctaaaaggaagccctgaaacacctctacttctcagtgctactctggtcttgagttttctggaacatgttcaacatgcattcatttagcaaagctttgattgcaagtgcctactatgtgccattcctttctaggcatttactcaggctgttcctccacctggagggcccttagcctcatcttcttttgagtttcgaattgcagattttcccaggagaggagtctccatctccttcagcactttgcacagcactccttaggtgagagttgagaggtgtgtgtgttttcccctaagttatttgtctccaaagagcagggaccgtgattttttcttcattgtgtctctacaagaagcactagcacagagcttttctcaaatgatatttgttgagttgaattatttgcaaatgatgaaagctttgttgagttctgaaagcctgggatcttcagacccaagcctgaatgaatcaggcctatatttaaacaaagcaatacaaacacacatttggaaaaaaaagaaaaaaaaacagaacaaaataacttctgaaaaatgctgggttcccttacatgattattgtggctgtaaacaatagtgcaagtgcccatgaaggtttctggccttctgatttgcttccagtgttggttttctccctgctcttctcctttgcactcttcaagttaaactgccattgcttgattgagccatttcccaacttcagcattaacactggaatacaagtttcacaaattcctcccatctgggcacaaaagaagggaaaaggatgggctctgcttatgcagtttggccttgaaagcagaacactccattaacacactcaaactgactcacaccacaggcatcaggacctctcaatgagaagggggtacaccagtaggtaccaggcacacactcggggtacaggatgctacctgtttgcagaacctttgtgaaaggaggcatgtgtgcttgacccagaatgattcagaggtttttgacatgcagagaatgccagttgcagaggctggaaaggtttggtgtgctaggtgtcagcagtggttttagattctgtttggcctcttggtgctgagtgggaggccgagcacagtacttaatttatctatggcagctcaatactctttcattgtatatgttggagattcctacagcatgagttttgttggggaaaaacgaggaaagataccttgctaaagatatgtctgcaagtgtttggaccaaggtaggcgtctgcgtggcaatgcagaagagggcagcgctggcatacctggccgggaatcatgtgcggctaacatatttgaaatgggtcaactctaagtgttttgcagagccctacacctcaagaaatgtgtgcatagggagacactcactggaggaggaggacatgcacacaaggacccaatgcacgcatgaagacagtcataaggagagagagacactcacacagagagacatcaagaccgagagagaaacagagagacagccacagagaaaccaagaaagaggtacacacgtagagacagggacagatgcagagaaagacaagaagagatagagacaggggagatttacccttacacacatggaaacacagtaacatgctgagagagacacagagccaggtacacacagatacgtacataaagacagacacaacatacgctaggggaccgagattcagagagaaacacccagacacacacttcggggggtggagagacagacacaagcagacatggaaagagagacaaatgcagagggagagaaggagtgaacccctagatttagattgtggaccattctactcaaggaacgtaggcttcagagtggctagtctcctcttcactggctgccgtcccacacagctgtccacaaggggagcatcttgctgtgatgagtgtgaccctaatggataaggacgtttttgcaccctctagccctccaaatcctaaccaggactccaacttgtgttcaaatgcagaaccagcgcttggttccaagaaaaagaaattagacttttcagatttgttgaaggttggtcagtttaagggatctttccagagtggtttaaccatgttttcccccttactggctaacttcagagcttaataccctataatgggagggtagcttgaagtgacacctctagatgttgagcaggaatgtggcatatagactctatggtgagaccacaagccgagatcattgaaaggccatgcctctagctttggtcaggggaggtgagagtctggaagtggcgtgtcacattggcacaactgaggaatggtaacaagagagggaggagactccacagagtcagatggctgactgggagtggggagatgtctgcatgtcccgagggtctccaacccactgtgtctgggatactggctttggtggtgcaatggccacctatgttttatacctggtgaacttaatgcacagtgtgggtggtcttatagacaaactcggcaggttgttcaggaaagaggtgttacataatgtcagatttgggatgtgaaatcatttatacgatgaaaaaaatccagtgtccaaaaaattcaaacatccgcaagactaagtagctaaagtagaaggtagtgaaattgactggatatagaaggaatccaagaactttcagtcaaagctgtgggagggaccattctcagtacccctttaggtgcccaggatgagatcaaggctgtgagaagggccatcctaggaggaatttgggggaggcaaatcaaggccacacatgatgtcaacatgacaaaaagagattggcatgctcagtggcactggttgaagcaggagactattgagccaaggtggttgagtgatgttttcagagacatggagagaggagaagaccaatcccatttctcagctgtgagatgcaaattctgtggctggagagaggtgagccaggagaatgctgggctggtggggtgatgtaactggggacatctcaatgaagaggctttccatgagatggtgatcattgatcccagcagtggggaggcctgtgtgggatctcagatgccctaaagttctattgggaacttaggtatggtgtgagcaagaaagagtcagctcaccaagatggtggggtggggggcacaaggcctgatgatctcttaccaggactgagggtcccaagttggctgaagggtcagagatggccaaaggacagaggtagctgaggcatcgcaaactgatgtcagagtccttcagagttccttgtctgggtaaaagacaattagcagaaagtgctagaagatagttttataccccattttacctccaacttatttttttcttgggcgtagtggccgtggccatgaaagttgtcaactcagatgaccctgagtgttggtgtaatttagagattcccagtcaacagcaatggctacaaagtcgtggaggcaataaagcaaaaaacagcaacttccatttctgtgttatttccatgcacagaacccaggtgggttcatggtggtccctaggaagggaacacacattagctcttccaggataatacggggttaagtttgtgacctgatgctaccacctctcctctggaaaaatcccttaaccttcctaagccttgctgtttccatgcataacacataggtaattaatacttaggttataagattgtggtgggaagtgaatgaactagtatctattaaagccttaatacaaagcctggcatgtagcaagggctcctgctgccattgttgttactatgccaaaccatatgaaagtggttagggccaaaacagtgaatctcagtgatttcatgtggttcatcctaatactattactgtggtcaccactagtgactcttgtcaaattgtctcatttatgggctgtagaatcctgggagctcttgagtactcagcataaggatgatggctctcaacgttggattcagaggtgttttccaaagttgtgtagaataaaaggaacatttttgcctgttgcctgggagctttgtcccagagaacataatgtacatttccctcctggaggctacagtgaactcacctgagtttgtagcatggaagtaagacagagccattgagtttactgctcctgattctggtggagagtagtaggaaaagcaggagagaatagtaggaaaagcagaaaagaaaagaaaagaaaacaagtaaacaaataaacagtttttttagacagtggcaagtactctgactgtattaaaagaagtgatataagaggggagtgagtgatagtttcaattggaggatcggtcatggaaaggctttgatgaggagggggatttgcccaaggctggcatgtgcctgatatgatgggaaggagcaaagcaaggtcaggtggctggtacatgtgaacagggagaggaaggacaggtgatgagggcagggaagagatggggacaggtcatggagaacctgtttaatggcaattgtttttcttctccagtgtaaaaataatgaaatcctcttaactcacagcagtgacaattcttatattttatattatgctttactttagcaaagagatttgcctctgttattgcatgtgatctttagaacatgcataccagagagaagaagagaaggatggggagccagggaggagtattcatttcctcatctcacaataaggacattaagacccagaaaggccaggaagcagggctagaattgacccctatgtctccttacctctattccttctgcagttcctcctgaggcctggtcctcattagagatttaattcctttggaagaaagactgaataaagctcaggtagctcattgtttaattatgcattgttgttgtgatttgtaaggaggatagctgtttgtttaatgcaaagtcataccctgcgttccccatcagcaattctcactaattaaatataaggctagaaataggttagaggtgctaaacaattgcctgtgtattgaatatgatgttcatatgtaaacacagcccacagatcacaagttctgaaatgtatgtgttcttaattagccaaatgtgagccccaggttggcgtaaatagaaactcctcaataaacgttagtgtgtcacagcgttagctagaagtgtggtagctgagaagaaattaatcactaacacatctgagtgtgtgtatttctttttgtaattagttatcctttccaaagtattaaatgcttaggatacatatctatcccaagcctgcgtatccatggtaaccgtggcttttgctttaggctgaagtcttatagtaactgaatgaaaatccaggtatagttgattcagtcacttggtggacattagtggaatgccagataggtgcccaaatgttagcaagacactgagtgatgacaaatcagaaatagagcctgttcatagatgagtgaggcagttagggagggccatctatggcagactcaagatagacaggataaaaggtcctatgtgaaaatttgtaaagaagttagggaaagaagagatcactcgtagttgaagggaatgagagaggatctctgaaacttaaaaagttactgatgaaggactcatatctagaagatataatgaattctcaaaactctggtatatgtgtgttctcacaaaagggagctaaacatcaggtactcatggacataaagatggtaacaatatagactatggattacttgagtagagggagaggaagaggaggtaagggttgaaaaaccaactattgggtcctatgctcactgcctgggtaacaggatcattcatcccccaaacctcagcttcacacagtagttacctttactcaggtaacaaacctgcacatgttcccccaagtctaaaataaaagttgaaaaaggaaaaaaagtctatagtattcatggaactgtggggaaaaaaaaaactttatgatagaaaaaatgaacaatacaagtagagtggacaaaagacataaatagacatttcattgaagataataaagggtggcacgtagcacatgaaaagatactcaacgtcaccagcccatagggaaatgcaaattaaggccatgatgagttatcactgcatacattaggacaatttttaaaatgacagcaccagatgctggtgagggtaacagaaaccaaatctctctgatggaaatatagaagacaactactactctggaaaatagtgatttatttattttttatttatttatttttttttatttttattttttttagacagaatctcgctctgttgcccaggctggagtgcagtggcatgatctcagctcactgcaacctccacctcccaaattcaagcaattctcctgactcagcctcccaagtagctgggactataggcacatgccactatgcccggctaatttttttttttttttttttgtatttttagtggagacggggtttcactatgttggccaggatggtctcgatgtcctgaccttatgatctacccacgttggcctcccaaagtgctgggattacatgtgtgatctactgcgcctggccgagtgatttcttaaaaaccaaacgtatacttatcataggacccaacaattgcacccaagggcatttatcccagagaaagggaaacctatgtgtacacaaaaatctgtacatgaatgaatgttcacaggtagtttatagtagctgaaaactggacacagtcaaaaggttcttcagcaggtgaatggttaaacaaacagtggtacatctataccatagaatattacccagcaataaaaaggaacaaactattaatacacaaaacagcttgtatggatctcaagggcattaatgttaaatgacaaaagcccactttaaaaggtcagataatataggagtcttttatatagattttcaaaaaaacaaaattggcatacacccaccattctgccactgttgccagcacatgctagtaagcatggatcctgctgccactgccccagtgaagtgctttggccagcatcctctgtcagagtgttgtttccagaagatggggaacacctatgcccctccagcacagcaggttcttaaccttgaggggcagagaacaaagctgggggactggtaccagcccccccagggttgcagcatactcccccaggagtgctgagctaagccgtggccccctgaaatcttccagaaatgaagctcatcaactgaacctcttataccataatcaaaccctcagagcatcaaataaaatcggagctaaactgaatgaaattaagacatggaaaaccatacaaaagatcaacaaaaccataaattgggtctttgaaaaaattaatcagattgatagaccactagctagactaataaggaaaaaagaagattcaaataaacaaagttagaaatgacaaaggggacattaccaccaaccccccagaaataccaaaaaactccccagagactattactactacttctatgcacacaaattagaaaacgtacaagaagtggataaatttctggaaatatgcaacctgttaagattgaaccgggaagaaacggaaaccctggacagaccaataacatttccaaaattgaatcagtaataaattgcccaacaactagaaaaagccacggaccagacagattcacagccaaattctactagacatataaagaggagctggtactattcccactgaaactattctgaaaaatgtaggaggaggaccttctccctaactccttctgtgaggccagcatttttctgataccaaaatctggcagagacacaataaaaatagaaaagttcaggccagtatctttgatgaacatagatataaaaatccgcaaccaaatactagcaaactgaatccagcagcgcatcaaaaagctaatccactatgatcaagtaggctttatccctggcatgcaaggttgactcaatatatacaaatcaataaatgtgattcatcacaaaaacagaactaaaaacaaaaaccacatgattatctcaatagatgtagaaaagccttttgataaaattagacatccttcttgttaaaaatcctcaacaaactaggcattggaagaatgaacttacctcaaaataataatgacaaatccatagccaacatcataccaaatgagcaaaagctggaagcattccccttgagaactgtaataaaacaaggatgcccactctcaccactccttttcaacatagtactggaagtcctagccagagcaatcagtcaagagaaagaaataaaaggcatataaatagcaagacgggaagttaaaccatctgttggaaatgatatgattttatgcctgggaaaccctgtagtctctgtccaaaagctctttaatttgataaacaacttcagcaaggtttcagcatacaaaatcaatgtaaaaaattagtagctttttctatacaccaacagtattcaaggtgagagccaaatcaagaatgcagtcccattcacaatagtcaaacacacacaaaaaaatacctaatacatctaaccatggaggtgaaagatctttacattgagaattataaaacactcctgaaagaaatcagagacaacacaaatggagaaacattccatgctcgtggataggaagaatcaatactgttaaaatggccacactgcccaaagcaatttatagattctgtcctgttcctatcaaactaccaacgtgacttctcacagaattagaaaaatttattctaaaattcatatggaatctaaaaagagccagaatagccaaagcagtcctaagcaaaaagtgaagctggaggcatcacattatctgacttcaaactgtactacaaggctacagtagccaaaacagcatggtactggtacaaaaccagactcacagaccaatggaacagaatagagagcccagaaataaagctgcaaacctacaaccatctgatcttcaacaaagctgaccaaaaggggaaaggactcctttttcaataaatggtgcttgaataactgactagccatatgcagaagactgaaactggaccccttccttttaatgtatgcaaaaataaactcaagatggattaaagacttaaatgtaaaacctaaaactactgaagacttaaatgtaaaaactctggaagataacttaggaaataccattctgtacacggtctctggaaaatatttcatgacaaagatgccaaaagcaattgtgaccaaaaaaaaaaaaagacaaatggaacctaattaagctaaagagcttatgcatagcaaaagaaactatcaacagagtaaacagacaacctagagaatgggagaaaatatttgcaaactatgcatctgacaaaagtataagattcagactctataaggaatttaaataaattaacaagcaaaaacaaccctatttaaaagttggcaaaggacatgaacagatacttctcaaaagaagacatacatgaggccaacaagcagatgaaaaaatgctcaacatcactaatcattagagaaatgcaaatcaaaaacacaataagataccatctcataccattcagaatggctattactaacaagtcaaaaaatagcaggtagtggtgaggttgtggaggaaggggactgcttatacactgcttgtgggaatgtaaactagctcagccattgtggaaggttgtttggcaatttctcaacttaatacagaactactattcagcccagcaatcccagtgctgagtatatacacaaaggaaaataaatcattctaccataaagacacatacatagacatattcattgcagtagttttcataatagcaaaggcatataatcaacctaaaagcccatccaaggtagactggacaaagaaaatgtactaaatatgcaccatggagtactatgcagccacaaaaaagaatgagatcatgtcctctgcagcaacatttatggagctgaaggctagtatcctaagcaaattaacataggaacagaaaaccaaatactgcatattcccacttataagtgggagctaatcatttagtacacttggatacagagaaagaaacaatagacaccaggacatatttgagtgtagaaggtgggtgaagggagcggatcaaagaattacccattgggtactatgcctgttacctgggtgatgaaaaaatatttatacgaaacccctgtgacttacaatttccctatataacaaacttgcgcttaaactcttgaacctaaaataaaagtttaaataaaaaaaaaagaaaaaaatgtttaataaagggcagcatattattgcaccattcaagaaaaataaacgaaagtgtggaggtggagaacagattagtggttgtggggttgccagtcttgtaatggatggaggagaaggaacaggagtgcctccccaaaggattacaatggtgatttgggtggtaatggattcattctgtatcttgagcgcaatggtagttataccaatctccacatgagataaaatggcattgaactaactatacacacgcattgtaccaatgtcagtgtcctgggtttgatattgtactataggtatgttatattttataaactatgtcagcatagtactttgagaaactagatgaagagtacactaccagggatctctctgtactattttgtaccttcctttgaatccataatctcaaagcaagtgtttctaaaactttaccaataaaaatgttaaatcatagctagtatttagacagtacctagtactgagtcctaggactttattaaagatttattttatgtaatgtattattaattgtcagggaaaaactatgatgagatgtagacagtggtgttgtgcctttcttacggatgaggaaactggaatctggagatatgaagtaatttgctccaggtagcagtcagtggtgtgatgaggatgcatgcacaaggagtctagttccagggctgcatttttctccactatcctgtcccttaagctgcctttggctttcagggatacataagttctgtcaagccaggatgtgagtatgatgaaggaatgatgttgaggtatagaagaatttccatggtagagtcaaatatgttctttcttccactccaaggctgttcttggtacttgagagagtagcaaagtcttcatgccagggcctcataggacaatattggtgccttttacagacaggagtaaggtagcccctgtaattagacaaggagagttgagttgttcttacttccatttgcagttaatgattctaattaaagtgaaggttaccaagggcctctcttgtcatactccatgcaggaaaggctgggagaagggaggcatttcaagtaaagcaggtattcatgttcttcttcctcttttgtccctgaggtataatcctcctccaatttcgttgctgatttatttaaaggtgaacatattttttagtctgctccccatccagctgcctaatctctctttgagcccaggtttaaaaaaaaaattgactctgtcaacctgcaaatggtgggcgctcactggccttctccttttcaaagccctgagctggttcctgatcagcttcctgattcctattttccgttttactacctgcatcgtgcaagcacttccattgtcaggtgtaagatctcggcaaaactatgtgcttttgaggatgtgcccacagatttaatggaataccttgtttttcttcttagtaatataacaggagagcagattcatgctcaaaataatgggttcagcattctggttgaaactagctgaactatcagaatctctcaggcagaacaacctagagactcctatagagaactaggaagccaggcacagtgggtcatgcttgtaatcccagcactttgggaggccgaggtgggaggattgcttgagcccaggagtttgagagcagcctggacaacatagtgagactctgtctgtacaaataatttaaaaaaatattagccaatgtggtgcatgcctgtagtccaagctttttgggagcctgaggtgggaggatcacttgagcctgggaggtagaggctgcagagagctatgattgcaccactgcactccagcctgggcaacagagcaagaccgtgtctctaaaaaataaaaaaagaactaagggctgtaatccagacagctaagtatgggagaggggatgaatcatgtggagtcttggaaagctctgattctggaggaatatccaagtgagggtttcagcaagaaggaaaactgccattttgttttgtttaatgcaaagcctttgttctgtctcgtaaatatgccttccttttaccaacctcactcttggtcgaatatttaaccaatggtctgacaaacttgtccacaggcgtatgaggagggtgaaaatgagacctgcgctcaagctgagtttgaagcatcacatctgactacaggagtgtggggaggaggaaggtagtgtatggcaaaggcatggaaagatgaaggctaagggtgatctttgcataagcatcaaataatatgtctataggaagggcaggctgagagactaaatatgtattcacagccaggggctgcagtccagagagcaagatacggtgaaaggttcagaaaggtcagagaaaccaagtgtggagagagccttgaaatgggagcaggaagacttttgtcagggtggcgatgtgaatagttaacagggtccacccctagttgctaggccactttgggttactatagatcgtgagatgattccagttctcagggctttagaagattttactgactgtattatgggggaaggcacttgagggaaaagtctagttcacgagaggagtgagctctcatccaaggtaacattacttttccacacactaacacatttccagttcacagtgctttgccagttgagccaacccacttcatcctcagcccttatcaccttaacacactatatcctacttcatgcattggggatcattgtcaggagagagcagggagcgtttgccctcagaggacctcgtagtggcttttaccttcctctcctgggtcccttgacgcccttgcagaaatgtgcatctctctcgtgggcctcatgacatcttagtacctggagtgcagctctgagtgttatgcgctatgtccagtgtctgttatcacactttgaatgcaaagattacacagacccacaacgcaagcatcaaggcagtaaaacatcccaactctggttatataactacacagtacccacaacaggagtctatgcaatgtgtcaggataaaagagaatgtgggatatcacaaggaggccctttgcatggacagaggaaagccaagtatgagacaagagatagagaaagagagagagatcataatgtagagcaattttcaggagaagaaaacagtgagaggtgggtaaaggcatttatattccaactgtatccttgctactttggctggacctgcattgtggctcatatgaagtctgtctgatccaccctcctgccccttttgtgtcttcacagcagagcactgttaagggtagttggcagcttgagaacaatcagcatacactattgcatacacaaaagaacatgtcttcaagttttatttctgttattactttgaagaattatacttcctagttttcagcctaatagagtttttgcagtctcttaacattgagttagagatacttcctgtctctcctttttaactcattcatttaacacatacctattgggtgcctactaagtgctagtcatagtcacagatgctgggatcatggccgtgagtatgggaacaaaaaatgaaaaagtgaataaatgcagattttaatttgagataggaccggaactgtttatatgtaatatagaaattggggaagtcctctctatggaagtaacacttgagcagagatctgggtaaaagtaactagaagagcagcttacatttataaggcattttctaatggtgccaggggcggtgctaagaggttttcatgtattatttcatttaatcctctcagaagccctttgaagaatagactttattatctgcattttataaatatagaacccaaagaattaagatattcgactgccttcacaggtcacacaggaaatgaaagttggggtggggatttcatcccagctcatctgactttagagctcgatgctcttaatcaccaagctccacttcctaaggatttgtaccccagtgggagaaaccctcgttctctgccttccatctccctccccaagcaaagtttttcacactgtgttctttggaagctccagggtttcttcatgcccaggataagtatattgactccacattagtttttaggagaatggttcttctacctgttcccatttagtaaattagacttcagtagaataatttttaaaacaatggtaaagaccttaagagaaagttaaattaaaaaaataaattgtgaattttttttaactgaaagatgttgtggtcaagtagcacagattttgtggttaagtagttgtagtactaataatcgtggcagcggcagcagcaatgatagctgcaaacaccttacatctatgcttactaagttccaagtactagtctgggtattttgcagtactaaccaatttgatcctcacagcaaccctctgagatgggttcattttacaaacaagaaatctgaagctctgaggtgttgactatctcaggtcccacagctggaaagtggcaggactaggaattaagcccaggctgtcaagctgcagattctgtatattgtcatcccgtgacctaaggttaaggacctgaaccttccatgtcacttagcttaaagtgaaagctatgcttgctgtgaaatcctgacttgctggatgtatgaccatggagcgcactttacacattcatgccagctagaggatgtctcattaactcaaccttacctgtgacactccctacctctatagactttttgccggtgagggtgtgacatttctctggagcaaaacttgatacccaaattttatatccatgagcctggtatggcctgttttatgttactaattttaaagaattgattgttggctaatcaccttaatgagttaagcctgagttggctgtagccagggctcagcagtgtcctaagccaacgcctagaagacacattcattttttcacatgtcaagtacacacttagccttcaattggctttcttgaccaaatgttaattccaaaggttaaaaggcatagaaaaatcattataaactattcacctcacctcacctcctgcgccgcaaattctgacccacaccttgagggagcatccatgctgaaagttcctaaaaggtctccgccactgtaaatttctgatctgtggtgagattcctggcaaattggagttgctattaagactctgctgcagttccctctgttagtgtagggtcctgactaaatggtatgatgcagtgtgtcttctgttaatggccagtctgtgtgagccacggagactgaagttaggaagggttccattctgcactgaaaaagtttggccagcataaatcaagggcctcaatcactgatatcacccagaaaaagaaacatgatcaatttttcatgtaatttctggctggtacctatggaatcactctgtctcattgtacaacagagtatattatgagaaaaatgagggttggtgctggggcttcccccactgtctgttgcctcttttattgttattgctttagcagtattcatcgtttgtgcctcaaagccaccagacagggccccataaatctctctggctccctgtgtggaagccaggctgagatgatatgcagctctctgggtgctcccagcaccatcattctagacccaaaccgagatatgatttaggaggtccccataaaactggggctcattgtcctaatcggagtcatttatcctgtcttaagctatcaaatcagagctcctgggttgtggggagttagttagggggtggtttttctagtatattttacaatgtatattttcaaacttattttgaaaagaatctcatttatgaagggaatgtgctttttcgttggtttttaaataaattttattgtgtgtatttgaggtatacaacatggtgttaagacatatatacaaaatagtaaaatagttactataatgaagcaaattcacatattcatcatctcacatagttactcacttttttgggtgtttgtttttgtgacaagggcaactaaagtatactcatttggcaggaatcccaaatacagtacagttttacctgcagtcttcatgttgtatgttagatctctagactggttcttcctacaaatctgctgcttactattctctgacctgtatctccccattctgccctcccaacctccaccgcagtctgataaccactgttttattctctatctctatatattttactttaagattccacatttaagtaagatcatgtcatatttttctttctgtgtctggtttatttcacttagtgtatgtcttccaggttcatccttgttggtgcaaatgacagaatctcttaatttttaaggccgaataatattcattgtatttattatataccattttttaatctgtttgtcctttgatggacatttacattgtttgtatatcttcactactatagataatgctgcagtggacatgagggtgcagatatctttacaagatggtgatttcaaaggtaatatggacttgtagcacatctgggtagaacccttgcaaaaagttgcagctccacttggcagccctgtaggttgagatttgccccatgctggaagaggatgtcatttttaaatgtgtgactttgacgtaaatacctgctcacttgagttagaaggaaaatgtaacccttaaaaagatgattctgcttaatactttgtaattcaggaatgtcaagaagcaacaaagcatatgtaccaagagaaaagcaggatttggattacactaaattctatttatgccgaatgttttattttgttgaagtcacatgtgaaaatagcaatattgaatgatgaaaaatcttaaatttagcccctgttaaggagaataatgttcctttgaaagattttgtagtaacggtcaaagcaaggagcaaattacttatagcaaatcataaaatggtgggagaaggagagcttcactttggaactcttagctccttgctccaattcccacagtaaacaacagcacagttttaaaatgttgcacgtgggcccagagatatttattcacactaaagaaacacaacttctaactacaccaaaatgagtccctcctgacgatgtttaaataaattgtgccaacccaccaataaagcacgctgacatgtcatgaagtgacagccatcacttttaacacatttcatcaccgctctgcagaggctgactatctgtatcttatcacactgtgaagggtcctttgttccttcatttctcctggcatctttttttctctctagttaaacaacccagccatggctgttggacaaagaaaaaagaaatatgtcatcatgttttagttatttttaaaagcacctgctttttagaacacaatttgcaaagattatctgaaatagattaaccttttaaagtgataatgacataaaattatgtaagtaattttcctaagaaataacacactgaaaataatgtgtgacaccatcgacataaagctcagcataggcttttgtctgaattcagttactttggggtgaccgttttaatcaaaccatttgtctgtctctacatccaggaatgtccataccacaggtatcttgaccttccccaaatttctggttctactttctggtttctttgttagcactggaaagagaattagcacaagcttgtccttcatggctgacctctccaggtttcttatcacttttatttaaaccagatcttagaggcaaaaaccacagtagtattgcgctcagctagtgagataattaggaagtgctgtctccataattactatgttactgtctctggagggacatgaaagcttgtcctgtccctttaacaggacaagttgctaattcccttaacattttttcccctttggactgatcatatttcacaaatttttgcattttgaaatgttttaaagggaggcttaagcaataatgcacagattatggaaatgatgctcattaagtagaaggcagatttctgaaaaagccacagagctgcctcgaaacatgtaacctccattagaggcttcactcgaatgtttattcatggagcagtaaatgtttattattatacattttattgaaacataaattaaagaactgtaattatgtgtatagcaaacagtaaagcaatgtgcatttgtcacaaaatgagtaagacaaggaaaaatgctatcattgtttcatttgcatccaaatccttttttgtgtacccaacagaaaggcacccagagggaatcactctacaaattaatgttctgatatgatgtataaataaaaaaatagatattcttcatattttgtctaacaaagacagcaccctggaaataatttgtaaagatcagaagatatccaaagaaaggttaggtttcttcttctctcctgagagagaaccacagtagctcttaatgaagttaatactgaagaacaaatatatccccttggcaacccttgcaatgctgactgtttttaggataagctatttctccagacacttgagcatatctgaggagttttttaaaagggatttatgtgaggctagaaacacaagaacttcaaacttacattttggtaaaaagatacttttcaatggggaagaaaggtgtgtacaatgtgatcataatggctcttcatagaccatatctttgtatgcacaagaactttcaagcaaaagaaaatgacaagaatggcgaagaaaatcagtgcatatatttcttcttttaagcaagctaagaaattaagagcagtgtagttgtctattttttaaccatccattcatccatccatgcacctatctgtccacattcccactcatgtacctagctacccacccatccacccacccactcatccatctattcatccatccacccatccattcacccatccatcacccatccaccccacccatccatccattcatccatccattcaacatttagaaaatatgtcttctaacctaggaacctagggttagggaaaagaaataatcaggggaaaaataagtaataaatagcccagagttccagactagtggaagagaaaacctgtaattacttatactttgtggtaaaaagctgtcatggacatatgtataatgaatcagaaaagcctgaaagagtctgaagagtacacaaaggaggtggcatttgagcatgctctttaaaactcagaggaagaaaaggaaagagaaaggaactccacatggaaggaagaacacttataattttttctaccaagcacatgtactataaactccatgactacaacaacagctgagaagcacaagggtgacaaatcttgaaacatcctctgtatctcctaaaagtcattttgaaactttcatacgttttcagatggagacattactaaggcactgtcccttcccacccagcagcaagcagaaccaattttacaagaacctctgagctcctgcatgtctaactgaacaggaagactctatcttggaatggtcttcccagggttctacctgtccataacccaaggcagtagagatgacctcatctgagagccctacatctggagttatcctggttttatagctgttggttaggtttgtcaacttctctagaggcagtgattataaattctactgatatggtttggctgcatccgcacccaaatctcatcttgaattgtagttcccataatccccatgtgtcatgggtgggaccaggtggagaaaattgaatcatgggggcagtttcccccatcgtgttctcatgatactgagttagttctcatgagatctgatagttttataaggggattccccttcactgggcactcattcttctccttgctgcccccatgtgaagaaggatatgtttgcttccccttctgccatgattgtaagtttcctgaggcctccctagccaggtggaactgtgagtcaattaaacctctttcctttataaatcacccagtctcaggtatgtctttattagcagtgtgagaacagactaatacatctactctcttctcattaaatagctttaagaatttaaagctgttatgtcactgaaaaccaatcagaagccaaaagataatacagaatatttgtacaagattgatctcaatttgttagaagtccattctctctaatgggcccctcttgcagaagagcttactatcataaggttgaatagcagggggtgcaggggcagtgggcttagaacttttactaggctgtgttcaactgtaccagagtgttgatagtagtatcacacttggatgttggaatcgggcagacctactcattccacgttcctcggccttagtttcttcatctataaattaatgatgataataatttggattatatctatcatgcagttttatgataaataattgagatcttacaaagaaagtgcttagctcagttcctggcatatggtgcctggcatatagtaagagcttaataaatagcaacagctattaccgttgcctcttgtgatgataataagtaaagaatgctcaactggagaggtttctagcatgcttgaggttttttctttagagcttgaggggccctgttttagtctaaagtatttcttttccctcccagagctctactctgaacatgttggaggtttcatgaaaggtattgatagataagagttagtagcccattctttaaaaactttcacagagccttctttctttcctttcttctttgtttttcccctgctatctgcagatgagaatagttagaatgagcagaaataaaatttcctggcatgaactatactactagttagggagaccatataatttattgtccacagcagaacttaggagagtgaaagaagatgctgtttgttattacactggcctgttcatacctgcaggcctaaagctggatggttccaaacagactggggcatatggtcacccagacattagttatttactcaggaaggagcatagcaaaatacagattacgcttgacatcctatcaacctgacttagaatcttaactcggccacttttgccagcttggtgagcttgcacaatttatttaattccagtaagcatcagtgtgcttactgaaaaaaaaggagacaacagtttctattttttagtgtttcggtgaggatgtgataatatacagtactaagtaccattccaacatataatattcttatgtaaatggcagcaagttttataactgataatgacttaaaaatggtgggtggatgaatggtgtgctattactataaatacgtaagtaaagctttttggcttatgtgaaagaaataattaagtgttgtgtcagtattctctttatagagaagaagaggactgaatttgggggatttatttaccagcccgtgaaagaacccacatttctctagatgcaaagcctgcctcattcacatctttcaactgacagcctcagaatagtgggtgatgcatttatttccatgtctttgttacccagattatatagttaacttactactacaggagaaaagaagcctgggacttctttttgagacagccattggttttctttggtggaaataagatgtttttgccctttggaagtggtcaaggagggagccgggtgcaaaatatctacagtaatttgggacttagaatctactggaggaagcccaaggagcaaaaaattagagataggagaatgggagggaagactgttaattccttatgcccagatgtttccctccacatggcagtaactactcttattctttcctttaattcacttagtaaaggaaaatggaagaagccacttgaagtgtaatcgtctctcactgttcctgtttaggtctattacagaaacagtaggaagatttctcattttgttctgtttattgcagtaggatttaaaaaaaaagggaggagttctctcaacacctgttttcttaattgattgtgattactttgcccccaaaagtgagtggcttttaaacgaagtgggtacattctcataagccacattaccgtcttataaacccatcgttaaaataggaaaggtgacagaactatgacaacagctccctttcctagtctggatgagaagcccatatgccattcccctctttctcctcatctgcaatcaatgcttcctttgctttacaaagacaaatgctagacaaggcatgttttcttcctacatgccctgttttgagtttgagagcaatgaggaaggaagtctatctactttttatctgttctttttgttctgaatctcagtggaagagctctttaaaacaaaccaaaaaataaaaaataaaaaataacttctcctgggtttatccagtgcctatcacagcattttatgtgatccagtctttgggatgatgatgagctactcaggcttgcagtgtggaagatgggggaaattgattggcaaaatggatgcattgacacttgctcacctctgtgctcatggaggaggaattgaagaagaacttgccaatgatttccaccttgtgagctcaaagccaaaaggaaaaggcatatacccaggctctcagagttcagtgacactttatatagcatcacattccattatcttgctttttttttacttgaaaagatcttaatttttgaaaatttgaaatttaaagctgtctggctgctaaaagctcctttaaactctcattgtggcttggagcaatacatcatcaaagccatggtgcttagatgatgtatggcacccatatatcaggagatcaccatccctcttatgatatattattataactcacaattggagcaccaccagtgatgtatggcttaaaaacacaattgttaagccacgaaactcaacagagtctccacaaattctaggaggtgttttctgtttattttttttgtttaaactgaatttttttttattttatttttttcctcgaagtttcccaacttgattgggacactttgaacacatgaaaagcactatgtttcctctgtttcctgaaaggcataccaactgcctgagcattgctaatattctaagtgaaggagctcattgacagtagcatcagaaaccatcagtgtgcctgtgcattttgacaggccactaatttgattcttgagttgatcatgctgaggtatcctcaaagtcctgtaagtggcattacttccagtgacatttattttagaactaagtggctgtcagtaatttcatgctgacccttgactcgacttagttgcagaagatgaggcctccccaaatcaagaaaggcaaaatccagccatgtagaacacacagctttggggttggtgatggtctggatgaagtagaatacattcagcaaggctcaccgtagaattaagccttctggtttagaacagaagcaggttgtcaaaattatttttaaaactaatgtcctgtaatatagtcactgctggaattgactgaatattcagaatgtgcagcattagcttaagcactttacctatgtatttcacataatcggtataaaagtcttatgcgttgggatactggttttatgcccacttgataaatgagggaatatgaaagaagttaaggaattgactcagtcaaaagaataggtaggatctgaaccttggccacccatctccagtgactgaacaccaaactgcttaattgtaggggcttctacctttctgagatctgggaaaggtaggttgggcaagatgaggtagaaagcactggaacacaagtcagggtttcggggttctcaaggttccagtcccagccctgccattgctttgttattggtcttctaaaagccactctcctcttctgtgaaatgaagaaattaatcactcttaccaccccccaacgtttcctaattctaatcctagtagttttcaaagattttctgtttgtttgttttagtaataaattctttttgcaaatgaaatcgtgcatgggatcccaacatagaaacagataaaacagagctgctctgtttgaatcacggagggggaactgaagcctgccgccctttctggtgccccattcttacttccatcatgagctgctccttggccataccaggcttgttctggaagctctagggctttgggatttgcagtttaagaacctctaaccagatctttatctgtctggtatctcacccatgaaaaggagactaaatacttgaactttcggttcagcagcaaattatgagactccaggtgtcagaaatgagacagcactgtgcaaagcattgctacaagtggggtctgtgctctgcccacattgtgttacccccacccaccatggctgcaatgcatcctacctagcctgacttgcatctgactggccctggaaacctggcttttctcactctccaggtgggagaaggcagaagtgctggagtattgatgtctccccaggagcagttctcaaccagtgaggacaaaagttggtgtatgaatacgctagttccctcacaccttggctgggataactctgggatgcatattcttcactggttctcagagttctctagcaggttttataagctccagtcacatgaaataataactcacttgatcacacatcctatattggcctcctttcctttcttgtttccttcccttactcgtgtttccagggatcatccaccaaataaactacttgcactctcatccttgcttcagggtttttgtctggggcaattgagactaaaaaaaaaaaaaaagcgtgtatcatatttgtatcactctacatgaagaaaaggattgttattgcttggtagtgagattaactggtgatctaaattttctcctatgtgtttttctgtctcttccagattttctatgctgtaagtttttgatgttgatattcagcaaatggaaacaatcttattgttacattacatttggttattccaagttgagagctgttggtgattatacaaacatagaacaatagatgctgggcatgatcacctgaggttgggagtttgagaccagcctggccaacatggtggaaccccgtctgtactaaaaatgcaaaaaaaaattagccgggcatagtggcgtgctcctgtagtcccagctactcaggaggctgagtcaggagaatcgcttgaacttgggaggcagaggttgcagtgagccgagatcgtgccactgcactccagcctgggtgacagagtgagaccctgtctcaaaaaaaaaaaaaaaaaaaaaaaaaccaaaaaaacaatacgtgaagatttctgagtcttgctgagggaaaattttgtctcttccttacctataaaattggtagaataatacttcatacaggtgttgtagagataagaaaaatgtgtaaactatgcattaaaaatatcaaggcatctgtattcattctctacttgttgctataacaaattgctggaaacagtgcatgggtcatatggtaacattattgttaaccttttggggaactgcagaaacttttctaaagcagccgtaccattttacatctgcaccagcttgtacaagggttccaatttctccacttccttgccagcatttgttattatctgtcctttttttttttttttttttttttttggagatgaagtctcactctgtcgcccaggctggagtgcagtggtgcaatctcggctcactgcaacttccacctcccaggtttaagagattctcctacctcagcctcctgagtagctgggattacaggtgtgtgccaccatgcctggctaatttttgtatttttagtagagacggggtttcactatattggccaggctggtctcgaactcctgaccttgtgatccacccgccttggcctcccaaagtgctgggattacaggcgtgagccgccgcacccggcctatctgtcctttttattacagttgccctagtatgtgttaagtggtattgtctttgtggttttgggctaaggatgttgagcatcttttcatgtattcatttatccatcctctttggagaaatgtctattcatatcctttgcccattttacttaggatttttgtctttttattacttagttgtaagtagttctttatgtattttagatatacttcccttatcagataggtgatttgcaaatcctttctgccagtctctggcttggcttttcacattcttgcttgtggcctttgaagtagaaagtttacaattttgatgatgttcaccctcttccagttttaaggactcctgatgacattggggcaacctggaaaatctatgatacctctgccaatcttaaggtcagctgcttaataaccttaattcatttgcagccataatttatcttttgtaacttaacataatcacaggtcagggattaggtcatggataactttgaaggtggccattatcgttttaccacagtatcgtctgttgttctttagaatcagacctgccttctgcagttgctcattggcacatgtgagggagaaggattcacacagggccaactggtggaggttgcaggacaccagctgtggagcagggtagctcttcagccttccttgctctttcccccgccatgagccatgtttctatcccttagaattgaattacaatatattctgacaaggaaaaaggatatcgatacaaccacactggcaatcctcaggtgagtatgggcagaagagatgtgttcaaagagatggtggaaggagcagagacagcgcagaagaggcagagcctctaaaaatgatggcattgcatgctgtctctatttcacctcctgcttgctctgaaacccactgcagttaagttttgggtttttgttgttgttgttgttgttttgagacagagtcttgctctgtcacccaggctggagtgcagtggcacgatctcggctcacggcaacctccgcctcccgggttcaagcgattctcctacatcagcctcccgagtacctgggattacaggcatgtgccaccacgcctggctaactttttgtgtatttttagtagagacggggtttcacaatgttggtcagactggtctcgaactcctgacctcgtgatccgcccgcctcggcctcccaaagtgctgggattacaggcgtgaaccacagcacccggccttcagtttttttttttttttttaagtaatagctttattgagatataattcacataatataaaagaaaccctattaaaatatacagttcattcttttagtattgtcacaaagttgtgcaaccatcactgctatataattccagaacatatccattaacccaaaagaaaccctgtgcccattagcagttaccctgcatccctcttcacaaccgcaaatctttctttctctatgaatcagcctcatttggctttttcatgtaaatggcatggtacaatatgtggccgtttttgtctggcttatttccctgagcatgatgctttcactcagcgcacatcactcctttttatggccaaatcatatcctattgtcttcatatactgcactttgtttaccattgatcagttgatagtcatttgagttttttatactttttggtgattgtgaataatgttgctgtaaacatttgcgtacaagtttttgtgtggacatatgtcttcagttgtcttgggtatgtattaggatcagaattctgagtcacaaggtaactccatgttcaactttttgaggaactgccaaactgttttccaaagtaactgtgtgattttacatccccagtagtgtaggagggttccagctctccacactctggccaacgcttgttattgtgtgtcttttgattattgcctttctagtgggtatgaagtagtagctcagtgtggttttgatttgcatttccctaatgactaataatgtggagcatcttttcatggggttttaaattttgttctcctagccttactgaaacaattcaagctttcaaaaacatttcacaccgttagtgatacactctttgaaatttgttctctgggctgttggaacttaccctctcttgattttgcccctttccttactacagccttaaattgagtcctgcttctcttcccaaacttcaaacgttagagtggcccagtgctcagtatttaccttataccgttatgtttttcttcaggacacttatttctatccaaaattagaatgtatagtcatttccttacttatcttctgcatcacccattggaatataagctctatggggacagaggctttgtcttgtccattaccgtatccctggctcctagaatagcacctagaaatagatatttttgagtgaatcaatgtatactttagaaaagtgtacagaagtgttacatgaatgaaacaggaaaatcaggactccacaatcaaataagtttctggaatgctggattagatgaagttaaacaagcatcttttgtgtggaaattctcatactttaatgtgctaatgagcattgtgaaatgttatttgaccatgaaaacatttttggtgtggaatgtgtcatgggactttaaaaagatactcttctagctcaagcagctcaactgcaacccctagcaaatttgtggaaggcttttattaaatagatgttttgttggcacttagaaaagtaagttgtgatcaccacagcttaatatgaaagcagtaagaacagattatatcaaattatcctcatctctgctattcatagcgtttttatcagaatgtcattctattagaagtccatagtgatggtattttttcacagcaatgaggctttgagctggctctatcgtgatttccctgttctgagaagctgagtgggttgtcagcatcgtgtgatcagcctgtcacttaagaatttatgtcacgatatcagggtgggttgagatctatgccctcgggaaaaaaccacctgtacagtgagctatttacggtttcagtgtgtcacggcgaatttcaagtggttaccagtgatcaagagtggcttttctagaacttagtggtaacacagcctatagagatagccctgaactaaatcgagaagacgagggtaaagaatagtaggcaggggatagacctggaccctggaggttcccaagtgcaggttcgcaaccccccatatgttagtagtggatactaacaggcatattcctgaggaccacgcaaggagagtggtcagagtgcagaaagccagagaagcattcagaaagatgtctccacatactggacatagtagctcacacctataatctcagctacttgggaggctgaggagaggggattgcttgaggccaggagtttgagaccagactgggcaacatagtgagaactccattgctaaaaatatgaaaaaaagttagcttgatgtggtagcatgcacctgtagtcccagccatttgggaggctgaggcaggaggatctcttgagcctgggagttgaaggctgcagtgagctatgattgtatcactgtactccaacctgggtgacagagtgagattctgtggggagagagaaaagaaggaaaggaagggaaaaaaataggaaggagggaaagaagaaggaaaagaaaaaagagaaaagatagaaggaaagaaggaaaaaaaagaggaaaaaacaagaaaagagacaaagagtctacacataatgcagtagggcaggcaaaacagcaagtgacctccgtgcccacactggcagaagcaaggtaagaaaccaggtggatattgtaagccagtggttctcaaagtgtggcattagaccagcatcagctgggagcttgttagaaatgcagacttttagggccctgcagtctgcattttaataagccccaagtacaggtggaagattgagaatggctagtcaaagcaacagaaatcagctttcacaaaagagatgcttgaacaatgccctcattcaaggagcttcttaatatctttattttatttttttgctggtgcagaaatcaatccctgaatgtgatgtctacttgatcttcaggtttaaatttgtttttttaaataataaaactaattcttgtacagttctaggtaatgagtactaactacatgcaaagctgaatgctcagcacatggttagcagacttaatcctcttaacaaccctgtgaggtagcaaccattataatccccatatagataagatactgacacatagactttgtgagacaaggtcacacagttagtttgtggtaggtccaggatttgtgttaggaagtttgactggaagacactggtctggaacttcctagaatgtataagggagatgatgaaagatggatggatgggagggaggaagaggggaagaaaggaggagggggacagaaagaagaaaggacaaaaagaggagaagaagaaaggatggcaggagattctggaattaaagagtgagtgaaggctccttctaagggttgtctgtatccttgttctacgttattttcctggttttgcttttaagtcagcccatctggagatttcagtagatttcagcccaggcccacctgcctggctttctcctaagaatttggtttcatgggtagtttgtgatttattttttccttgtttgttctttcactttctctctccatgctcacgtaatctttgtgactgaagtgcacacttggcccaattgctgagagatccgtgactggctttatcattgactggcgaatattctggcaaaagcgtgtcactctttgggaactgtgctcaggggctgctttgaagctcctctctgcttcattcaccttggaccacgttgcaccctgcctcggctttaatagcgtgtcactttccccctccttgtacagcgaagccacagggacacttaaatcttacgttctcttgaggccttttggagcctcggaacccgatcgcagtaatcaggaaggggtgggtgatcagggatgaggtttgaccctctgtctgcctctctctatttaagctcttcattttcgcattcctccccacggtttgtaataaaagtggaacatagctcaagggcagaaatgaggtttaacttcagccgaggtacaatagaggctatttggaaagtaaaactttcaaatagcagtttagctttgaagaatatattgaattagatatgctctgagccctgattcaccatcattgcataatagcattgctatgtatattacctgggtgctttagtagactagagaaatgggctatttaaaagattaagttcgcagaatcagtgcatgtgctaatgaaacacaggagccaaagccaggcaacctcatttccggtgctgacttttacttcctgtggcgccctgtcctcaccgaacattgatatcttcttctgtaaagtggagatcatagtagaccttgcctcacgggatttttttttttttttttttttttttttttttgaggagtctcgctctgtcgcccaggctggagtgcagtggcgcgatctcagctcactgcaagctccgcctcctggtttcaggccattctcccacctcagcctcctaagtttttgtttttgtagttttagtagagacggagtttcaccgtgttggccaggatgatctcgatctcctgacctcgtgatccgcccacctcggcctcccaaagtgctgggattacaggcatgagccaccgtgcccggccacctcataggatttttaagagtactaaatgaagaatgccaaacacagagctttccttatcataggaaataaatgcttactaaatgagaactgtttgtattactattatatgattatttttcgaagccccaagtctgtaattctgcccatactacttgctacctcattcactcgctctttacttatgcagttctctgttagccaattcttatttcttgtcagtttcagagtcatgatggtcacctttgaagatgcactgtcatttcaaagcactggctaactacaaccaagactgacaaccatgaataattccacagagactctgaaacactctagcatttcgcaccaactctcatatataccccaagttgttctctcttgcttagtgcactctcttctcggcagatttcaggtatagttaccgaaggtggatatcaacttcctctgaaaaataacccagcaggaaccatcgtggagtaattgggcttcatgagagcatcactgtcaagtctaaaaatacatggggagataatcacattttttttctttcttgtacattttcagcacgttcacgtccatgttcttcccaggaaggctggagactttcacaggaatgacagcatctatgaggaggtgggtctgttctctctgatcttattgtttgatcacggggactgtcggtgggatgacatcaacctaatgaatcaagtattaccctagatatggtctgaaatggaattctatttagccagacttggaaagtggcaatagaggccaaggagtcaagaatggccatcgtgggaacccatgactaattaattataatgattttctttttcaaatgaaaaccagcagaaaccaagtgtccttgtgatttctatcctgtcatttaccaggacagtaaatatttgcatggagatatggcccagaatctccatagaagaaaacctacagtgctaccactggaaatcaagcagattgatatatgattcttttagtcaaatgctacacttaatttttaaaacactttggaactcagcttgtctttcccaacagcatttattcaaagtgaaactgtaaattatcatgagcaaaaactaggttggtttgagtaagtgtaactcacatatcataaatattaaagcagttaatttatttctaagtactcccattcaaagatacaagtgtgaaaccactacaaacatgaaccagcaagagccaggtgatctgcgcctaaagccctgtctacatgagaactttcagatgcccatttccaccttgtggagcatacagcctgtcatggatcaggctgttataaggtgatttcaatttacctgtttattgtagccaaagaggagaaagtatgtcccccacacggtagagcagattagatagcactagtgccctggagtgattggttaaatggactttgaggctgtttgtggatgcaaggaaaaatgctgtgattgattagcaacgcctgccaagggcattggataggaggtaggtatcatatttgccgtctttttgacattcctgttctaactctttgagaatgctttttaaaacacattgtttatctcgattgtttatcatgtggctctatcaaataaaccacatgattatctctaccttgtttccagggaccagttaaaatctatgcatctttttgtgtgtgtgtgtctatagggcttctttgcagtgatgaaattaaaacagcaactcaaaccctgaaaataaagaacaataggtcagcagttaataatgaaacgtataattaatgtttctggaacacattggattccgtgaggtggctggttattctgcctttaggataacccttactatcttttgctttgtatgttttccaagagctgtactggatgtgtgtagagtggaaatagtctagtcaccagtccctaagtgctgatttgtggaccagttgctgcaggtctcaattcccaggaggtcccgtcgctggagattctgatcaagtagattgcacagcactcaggaatcagtcattgtataaggaaatccccaggagactctgatgcatgactacctttgggaataggctctctgggttttacaaagccattttctgtaaaactataatttgaactcattttcgttggatgtggaatgcagtttggggattgataagggcttagttcacattggaagaaaatcagaattatagagtaattataaagagatgtaattaaaatacaaataccaatctcactaatgtaaactaaggttaatgttgccaaatacgactgttttaatgaataaattagcacgtgaattatatactagtaaatactgctaaagtagcataaaagtgcttgaaaacactgtttccttaggctgaacagtcaccttgaaatcttgtcgatgttccaactgtgcttaaaatgaagctgcatggttacttttcagcccagttcaagacacaatgtacagtgctgtggttggtgtatggcctctctctcctgtcttattcctttgcccttgtctgcatgctctgatggccccacagaaaagaaaacacatgtttctacttcccacattttggaggatcatctcaggagaagtaattactgtgagagtttttctttttttaaaaatcagtggtataagtcatatgtagtatagacagtatccactaagggaaattgtggtacaagactatgtagagattgaagtctagaaacaggcagaagtaagttcaaatcccagtggcatctactaaccatatgatattgtagcctgaaaggcttatttcagggcttggtacttaccaagaatttgttaatagatagtagtttctgttcttactgttattattactatttttctttaagtagcaatggttagtaaatagagaaccagattcaaagccaggtcattggatgttcccatctaccattctttccaagggtgagattcccaattttctctttgcctttaaccattcattctcagttttatcttcctctttgtatggaaatgtttctccaggctgagtatctaataacacagtgtccagaaagaggcatgaaaagcatgcagtaccgcacaggcattattggaatagaacttaatgtacattagaccaaatgatcttaatcagaagcgatggagtgatgagggatggcattctttatattgatgggagcacttgctctagattatgcatctgttcaggacattcaacaaacagactgccttggagggtgggaggtaggaaacaggaacagcaggagactgagctccataaaatgtaattgtatttctactgctgcagacatagaaaattatgcctaaagaagccccagagtataaattggctaggaacattgtgttctttctaggcactgttttaagatggttagtgacaaataagaaggttcataagaaaggtggttgggtctgaaaacagatttggagactaattgatggtgggaatgttttgcctggaaaaaggaagacttgtagagggaagatagtaacagagtcactgtttccaaatatctgaagggctggcaggtggaaagatattaaatacattctatgtggctccagagggcagatctgtgagtatcggactacaaagtggcagatatcattagctctccataataacgggtcaaagtgaaaaaaaatgaacacttaaagagtgccttccaagggggtgagcttcccatccctggattcactcaagcacagagcacatggccacaattcttcaagaggatatctacatttggtcagtgcatgggccacttggatttgtggtgcctctctttacacatttgacccatttgatcattaccgccattttcaggttttacaagttctgtaacaaatagtggggggttttttgtgatcagtattgcaatgtttgggtgactgcctagtgaaacatattgttttcattgttaagttcatggaaataaaaggtaaaaccttttctttttaacttagaggaaaccacactgtatttatttttttctcattcccagcctacttcctgcttttcctgcagctcagcattgcatattgatggtccttgggctttgcttgcctcttcacatgtgttttatttttgcctgcaaagtatttttggtgatttgctttattgtgactgtaaagtattttttaatgagtttgaatgctgttaggcatattgctcattctctaggcctatacagttgccacgactgccttctacctaggcttgcttcactggctaatggtgcatgcatagctcctgaaggcattggagtttaagatccttgcctatttcatgggctgctcctcttctctctgctactcaaagattactattccccaggatcttctgtctggtatactgggcatgctgtttaactgaaacatctgtttaatctccctgcctattcatttacagtgctctggccccaggtgagtttttttttgttttttaacttcaagttctgggatacatgtgcagaacctcctcaaagggtccttttcactgttctctgatttcatctgtaatagttaatcctctgtcccctctagagtaactctactatatcgccatacctatttccttcttaacacctcccacacttgacataatttattactttattattcaatacctgcatcccccaattatgtgttacagtctttagggcagggatctaatctggcctagggtggaccttcagtgaatatttgaaaatgaatgaacacatttaaaaaaaaacaaggtgttgaactagaagaacctgaaattctctgctagttctaacataatttaaaaggagactatatattgctcttcagacggtcaattcactaactcatagccacactgggtgagacttcgacatggtgccatcagccatctgaggtgaatttaatggggcattgatggaacagaatcctttggtcagaaatcagtgtgcagaaggctacaaattgtggtactctggaaaggttagcggaagcaattataaaccttgtctgattgctaagcaagtctgataggcacatgtcgaagttgataactaacttgccccctcccaccaaacctagatttgtgtggtggctataacaaatacagatgtaggatttgctgaaagcaggctcgagagctactcttcctttctttccaatcttgattatcatctctaagtttgttttcaccttctgttcctccagcagtatgtcttagacatttcagagtatgagcctctcttctgtctcaaaactgagctcaaactctcccccttccaaagcagattgtctgctgaagctcttcctttgtggttgtctatgcagatcttatttatctgtagctcccaaactctttctacatctatgttctttaaattttcatgaattatgccaagccttccctgaactcaatgggcccttcattatcttgacaagttgatgaagattatggtaatgacccaaatgcgtccttagataaaagagtgtgtatagccaatgtgggggaggaaacacccatggcctaatgtcatatcatttcattaactcagtaagacttaccctagctgtatcccaaataaccaactctcataactgtattggacaattcatcaaatgcttatgggtgacattgaatggttgtgactgtgcactgtatataaaacccattactgatgaaggaagtgactattactaaagcaagtgggaatagcaatcagcaattggacaaattcaaccatgaatttcatagacaaagcaactgtgggttcaagcatgtcatgggaaacaattgcttggcttaacacaattcatgagcaaaatcaacttgctaaaatgcaggccatttggccctgagggctggagagaaccattatattgctgatgatatttgttgttgaacttggatctctttcacacgccatttgacaatgggctcagagtccatgggtccctagttgacttttcaaaaaggaaggaatgtttcagtgagacagttaattagctttttgtcttctgggtttactgatgtcctcccactgagtggtaagtttctgggtatttcagaattttggaatgaaaactttggtgtctctcactcagaataagataacaacttgatatgttcttctaaattaatggagactttttattcaaagaaccagatgtgataaaactaacaaataagcatatagtaatgctaatttaatgacctatgacctcaaatgctccctctgtatctatgaatgctctttgactacctattttagtaatgagaaagctgggtaagcatctggtttaccctatcctatgtcagattattactgagctaaatctctatgttcctcaaaagagagacacaaaattagcagaaaagcatttatctggttaaaagttatttgtgcccatttttctcacagaaacaaatattcagataatatatgtattagtgttctctagcaggacagaactagtaggatagatgtatatatgaaggagagtttattaaggagtattgacttacatgatcacaaggtgaagccccacaataggccatctgcaagcggaggagcaaggaagccagtccgagtcccaaaatctcaaaagtagggaagctgacggtgcagccttcagtctgttgctgaaggcccgagagcccctggcaaaccactggtataagtccaagagaccataagctgaaaaacttggagtccgatgttcgagggcaggaagaatccagcacaggggaaagatgaaggccggaaaactcagcaagtcagctctttccactttctgcctgctttattctagccatgctgacggctgattagatggtgcccaccaagattgagggtgggtctgcctctcccagtccactgactcaaatgttaatctcctttggcaatatcctcatagacacacccagtaacaatactttgcatccttcagtccaatcaagttgacactcaatattaactgtcacaatatatgattcaggttagtcattttattaactctttttttttttttttccctaagagacagggtctcactttgttgcccaggctggccagcagtggcccaatcatagctcactacagcctcaaaccccgggtctcaagtgatcctcctgcctcagcctcctgagtggctaggactacaggcacataccaccacacctggctaatgcttttgtagagacaggtctcgcaatgttgtccaggctggtctcaaactcctagcctcaagcaatcctcctggcttggcctcccaaagtactgggattataggcatgagccactgtgcccagcccaggctagagctgagcaaatgaggaatgttgagaagcatggagggctataatggtagtgatggtgagctggagcctccaaggaagatcatgaagtcattggacactaaagaggaaaagtaatgaaagaaggctgaagagtgcttgatgaggaggatgcaggtatctacaggttgagcttcaaggcaaaggatgccatggctttttcctagagtttgctttgaggtaagccaccctagattagtttcccaaaattgctctcctatgttgtttgaatacgttcaatcgcatgttagtgagaaataagaaaaatttaatcacgtgtcactctatccatagcatccatagtaaatccactctatcaaaccactccatgtggtcctctctcattatttcacgaatcaggctttcttgtgcagagtcctatctgccctccacagtgaattctcgctccaaacagatacattccatcagaaagctctaaggtgcttgccggtgaaggaggaaaatgcctcctccgaggtgtccttgttgctggagtccatctgtcttcctacctgcttctcacagttctgctctcagtctcacagtggctgctgcaatgaaacctaagtttaactacagtgcttgaataatgggctgtttcggtgtttaaaaaaatcttaggtttacattcaaggttcttgacatagctattaataaacagtcacttaaaattgtccaaaaagttttgataagtttggagttaacctgctaaagcaaactaccaagacctcagtagtttttccaaatctattttacttagagaaatgagagtatagggattaaggatagaaaaaaaaaaagactattggaaaaataaattatgatcagaaatggataaactaggtaaagataaaacagatatgaattaagcattgacacgattccctcaatataaattataatggccccaaagtgaaaagcccccaaacatttaactttatctctcttttaatgaagaaaatcaaaataagcaagaattagggggaaacagaagataaaaattaatacaattttaaagtcccaaagcatttgtaaatgtttttatttttaaattatcacctgtcattctttagacaaaagaatgatacacgtaattcaaacaacctgtataaataaatcccgtaacctcttagcttggagcaaggttcattcatgtgccacatgccagcaggaaggaatcctaaggcctccaagttgcctgcttttggagacatagagtcctggaaacatagcctgatgtttagaatcccggcttgagtgttcaaatgtggttatatttttgtcactgcggggtgacgtctaccattaatgttgaatttggtagcagctagccacctgtgaccagtctgaattgagatgcgttgtaaatgtaaaatccagtttggatttcaaagccttctaccaaaaaaaaagtaaatatctcattaataatgttttataatagttacatgttgaaataatattttggtaatgttgagttaaaaattatatcactaaaattaatttcacctgtttctttgtacttgttttggtgttgctaccaaacacttttaataacatatgtatcatgcattagatttcttctggatggttttgctctagaatgctttcaaactgcttcagcttactggcaagcagctgtttgtggagactgttatgaccttccccagatttagaataggaatttgaatgatgccagattttctttctaatcaaggaaatcaagaaatagctggtatacctgtgtagctctaaattctctccaccttgagtcaacatagtgatttattgcaaactgtttaatgtttaacttgctatttaaatctcagtatcttatgtttcccatatttaaaatgggggaaaaatacccaatcatactgggcttctagtgtaaggttagtggtcataaacaactatagttcgcagtctttgctcctagggagagcactaatgaaaaataataatataatacaattattattgtcattgagaatacactgagactagtaatacatctattttaaataaatgtaatatttgagaataataatcaaattattactgtcaatgagaatacacattgggctggactgtctgctaggtgccaagcatatcattcataccactgaattgaaactaaatttgcagagagtaaatatctatgtcaaaacctcataaccagctcatggcaaagcttgtttatatcaaagtctgtttgactacaaagccgtccctgtttctatcaccctttgctttagcctaaggaaaatattatccttcaattttatggaaaacccatgtatagggagaaaagcgattttcttagacactgggacttccagtactaaatcccaagtggttttcatatccctgttcaaccttagagacatttacacacacacccacacacgacacacaacacacacactggatttccaataaatttataagtcctagacacactaccagtaatttagacttacagtgaaagaaatgacattttacaaagtcaggaattttctctgcttttaggatatggcccagtagtccccatctaggtactttattataactcctttttatagtttttgttaaacacaaggaagtcatcaacatgctctagccaagcttctaaaattcccaaggtcatccttttggagctggttttgtgtgctgaaccacttaaatacttttgcttgccctatagtgtattcatgtcataacacactaaaatatttaagagaaaattgctttttttctgaaaaagaaacagtcttgcttacaactcttaatggaccataaatatcttgtaggccagttgcaccagtacctgctggaaatccttcttacattagtggtaactaaggaactcatagaatattccctttgcacggaaatgtaaccttgctccaacatatattttccctctaaaaaattgtttcttctagtaagctcttcagagttattgaaagaacattgcacagttaggtcaaatctatatatgaaatttcactggcttctctgttaatcttggccctatcagttgatatgaagactgaggctgaatttccttttagcgactctaaaaaattgtttctcttagtaagctcttcagagttattgaaaggacattgcacatttaggtcaaatctatatatgaaatttcagctggcttctctggtaatcttgaccctatcagttgatattgaagactgaggctgaatttccttttcgtgacctggaataaacaactgcacttgttttcctaaattattttccatccacatgcggtgtctaccatttaccttctttccctggggcattgggctagtttcatctattggtgatctgggataaggctgaattggactccttgaaagaggctggaaacaaaattttcattagttggagatacctcaaatgtggagggagactgtgatatgataatgacattagcatactgatgagttagtagatacaatgaagtgctcatttgggcattaaggtacatttatctccatcatgtgtagaaacggaggcataggcagacttgaaaacttttctgaggacacagagagagtaagaaacagacctgagattcatacttaggctgtctggctccagagtctgggttcttttctctctgctgcctttatgaactaccagaggcatcttactcatcttcatcgtctctgcctcccggcacccaaaaaataccacttcataatagagtaggttgtcaagaaatgactgttgagctgaacctggcacttccccagccccctgcattcagagcctggttctccgaatcctcaggtccgtggctttcctttatcagctgcaagtctccccacttcttgggcactgcctgcctcctgtcaaaacctccccctgagaaagaacttttacctcagttattacaatagtagttcaaattgttgtccttcctgagatgccaaggtattttttcaaaccaacaaagcctgctgagaaaagaatgggattttaaagctggaatatgaggcttagtctagaggcacagtggaactttgtgggtaactccagaatcaaatcaccaaggccagctctgtcccctgtacccgtttctggaatctccctgaaaattagcttgataaattgctcccctaaaaggcccaccagtactctccaagatagacaatccaaaataggctggtcaacacacaccttcatgtatggaactgtgtctacacccaacccagagaataccaggcatttctgtgtcatcccctctacgttcaaaatgctcttacctgcattatggttccagtttacatcagagtgtgtgtgagtgtgtgtctataaaacttggacaactgatctaattaatttgaaaaatctaaacctgggaaacaatttaaatgccaaataatagaggaatatatttaatactatatattcatctatgtagccatcaaatgagtttttatgaataatattaatgatataacactgtacacaaataatcagaccaagaataataaagcaaattagtcctaccatgatttatcattagtaaaaatgggaaactggagagagaaaagttatatttcaaaaactgtagtacacctgttgttagattctagtcttgcctgtttttattattttctgtggtttggaatgaattctaatttttctgggctacaagtctgcaaaacaatgttttcaattttttttccttcttttttttcccatctttcctaatttggagtcaccaaaaactaagctgtgctttcgtaaagccaagtgaactgaagctagacaacggaaacttcagaaaaagataacagcaacctatttacatacataagccactttcatacctgcctactgatgtatggacttcagagtaatatggcctatatggattttacaggcttgttcttttgtttgttgttgttgttttttccttcctccccctattttttctttatagaacatgagacttacaacctgctaaaaatgaacatacctaataactcaagacctacccatctaggaataagccatcctagccatgagagatgagacaaaacctgagaccagagactcattttcttctaaaatgcttcctccaaaagattttttcaaagagaagggggggaaatgtgaaaggaaatcttggggcccccaaatcactaagctacagggaaaagtcaagctgggagctgcttaggggcaacctgcctcccattctattaaaagtcacccctctgctcactgagataaatgcatatctgattgcctcctttggagaggctagtcagaaactcagaagaatgcaaccatgtgtctcctatctacctatgccctggaagctccctccccacttagagtcttcttgcctttgcttcaagttgtcccatctttccagaatgaaccattgctcatcttatgtatgttgattgatgcctcatgtctccctaaaatgtataaaaccaaactgtgctctgatcaccttgggcacatgtcctcagaacctcctgaggctgtgtcacaggtgcacctcctcagccttggcaaaataagctttctaaattcactgggaaaaaatacattgggatataatattgaatggaaagagtggcatataaatggagaatggaatggaagcacatgtaccttgaaattaagagagattgtagcttcaaatagaatgttacactcctgttcctttcttcatattctcttgcatttcccaaacataatataatgagtatgcaataatttgataatgtgaaggaaacatcaggggtcactttttaagagcagacatcctgtgttctttttcattcattggcagaagccaatatttactggcagttgtttggtgaacctagtgaaaaaaattgactttagttttgatcaaaacctcatgggaaatacatgtgtgtgtgagctagctaagtagctgaaacacccaaagaggtgacttttttggtatttctactctttgacttgttagaaaaaaaaataaagatactccctgggatagaggcggacggatcacttgaggtcaggagtttgagaccagcctggccaacgtggtgaaaccccgtctctactaaaaatacaaaaattagccaggtgtggtggtgcgtgcccataatcgcatgtacacaggaggctgaggcaggagaatcacttgaaccccagaggaggaggttgcagtgagctgagatcatgccactgcattctagcctgggtgacagagccagactccacctaaaaaaataaaaagtagggccgggcgcagtggctcatgcgagtaatcccagccctttgggaggccaaggcaggcggatcatgagatcaggagttccagatcagcctggccagcatggtgaagcctcatctctactaaaaatacaaaaaattagctgggtcgatggtgcgtgcctatagtgccagctactcaggaggctgaggcaggagaattgtttgaacacggcaggtggagtttgcactgagccgagactgtgccactgcattccatcctgggtgacagagcgagactctgtctcaaaaaaataaaaaggaatataaataaataaaaataaactagccagttgtgctgatgtgatagtctacagttttatattcccatttgttttgtcttgtctccagtttcttctcaatcaccaagtcaactcttgctgtgtctgaggttcatttgagtgccaagtataacaatgattactttcacagtcaccagttggactattaaaaaatgaaatgttcttgactcccaaagttcagttgaatttctggctgtgaaagcaaaccatctcatcagccctgggccaggttttgctcagcaagttcagtgccgtttctgtcagttcaggcctgtaattcattcagtcatattctggcttataatctctcaattcagattctgtattctggggccttaatgagcaacatgtcgtgtggggtaggcagggattctgttgtccttggctgttgtttccttggcctctggtgtccaagtaatccactttgcctggtccttgtgtgcatctttggtccattctgatacccgtaaggaatgccatcattctttgcaggatggtgacctttggcctcctacattcctagaggtgtccatggtcctgacatagtctcttgtcacaagcacatgaaggacacttactctttggcctttgccagcttgtcagagttcttctcatgggctcaaaaaaaacttgtctgttcttacatactttgctaagacctgcaggaaattaggtgcctccagcagacattcatgttgctgctatagtccttcattattctctttgcaaagctgtgtactaccagaattctggatggaaaaagctgaatgcacattcaatctactcttagagtctcaaattcaaagggatggcttgcagtgagtcagctgtggaagaccaaataatagcctcccaaatggtgcctatgtaccaatctttcagaacctgcaaatatgttagatggtaaaagagaattaaagtagaagattcaattagaggctagtcagccaactttaagataaggagatgaccttggattatccaagtggactcaatataatcacagaggtggaagagagaggcaaaataagtagtgtcagagtgatgcaatatgagaaagattcaactggccatcaatggccttaaagatggaattgagccataagccagggaattcaggcagcctctagaagctggaaaaggcaaagagcctccaaaaaggaatgcagactggccaacacctgaattttaacccattacacccattttggacatctgacctccagtgctgtaagataatacatttgtgttgttttaagccactgagtttgtggaaatttgttatagtagcaaatagaaaactcatatattacccaacctcaggattcagcctgggggttggggaaaaggcaagggtagagcacaccccgccccagtgcacacatgcacacacatgcatgcacgtgcccactcatgtacacatgcactctttcttgctttatctctcttgactctgtccattatccagcttgaaactctattttaaactctgggggtgggcagttagaactcttctgtgtccttatccctgcatgaatcatttctctctcacactggggcagcgccttttgaattaaaggctaagctggtgagtgaaggagactactgctaagcaatagatgcacttccctttagccaagagatggtcaggaaggaaatggcacaccagtgattactttgaaatattagcctgctacacatgggtaagaaattagtgacagtaactgtgctacaaagttgaaaccgctaagtaacatgggatggtggtctctgataaagggccatggaagtgtggggaaggaagtgaccacctgatatggggccatcagaaaggcttcctatcgaggttcaactcctgtccctgtggctaatgagactatgggcagttccctctgcctgaggctcagtttcccttcaaactgagaggtattcatcatggtcacctgtaagcctgctttcagctctgatactttgtgattctatgacactaaatagttcaattgagaaagaatcacttgccctgagaactcctttcctttgatttccacgtggaggtcacattagcatagcagaaagggtattgacactgcagctgacttttaaaattcactgagaataggagataaaatgaaaacacaccagatggaatgtgagctccctactatttcaaaacttagacatttccactaaatgttggcacaaacttaaatatcatcttgaatgctatttacagttttcaaagtgacaacaatagcatcattcaaaagaaggaaagactatgtgaagagagatcctaatatctttggaaattttttatggatggaaattttaagagaataattaatcagatacgaaaacaataggctgggaaaatcacgcaggccattgagatccatctgtaactccaccactaaatgcctagatttccaggaaccaactccacagaagcagtatgaatttggctcatttcatgcagatttgctaaataggtttcaatgtttttaatttttaggggtctacatgctgtggttctggatccactttgtgttacagactcctctgaaagctttgccataaactggcaacttcctaatgagggaaatttttaatatatttacacagatagcttaaaaatgcatttaattttaggatttttaagggccacattaagaagccccaacttgaaaagaatgcccttgaagtctaggaaattacaaagactgattttatgcaagaagttttataaacacacacacaatcaaaaaatagttttcatgtccttggggctatggtgtccattcaagctccagctctctgtattcaagagcattgtactgtccagttattctcatagagcaaatgccagagacacgcaatgccagaatacacaaggaggaaggggtcttttgaaaaggaaagatccattagacaggatagtgaacttcattagggagccaataattgaacatgtctgatgcctgaatctcttatctttttaatgaaaagtccagtcccagaatcacacagtaccttccagaaaacaggccatacagttttacaaagcactgttatttgcatttctgaggggttttttttgtaaattgacttaatttccaatgcattatgattatataatatcattcaagtatagaaacttacctatgatacatctttttgaggtgctaaatgtctttaagctgtgaacgttgacgtttttgttcttctgtcacaggaggaagttacgtattcgggttttctattcttttataggcttttctggattttaagtgcaagatgactcactgtggctttataatatctaagagacagcttaaaattaaaaaatttttaagtctcatagagtctattgactccacagtggttgaaacaaaaccattttttaaaatctgagtttattgttaccatcatttgttcatatttaattaaattttatatgcctcatccctcctgcacacacctataaaaggcttactacgtgagaggcactaggttaggtttatacagacatacgaattcaagggatgagttgctcaaacttaatttatctgataacagagtgcatgcccttctaccataaaatgttcccctattctgacccctggtcttactggtatcacccccattctgaaaaatccaggctagaaactttgggtcatctccagtttattcttgaagttcgtcctctgtatgctgtcattctctagttctatcaattcttttttcctgccaagcccctgtcataattattgctattcttggctgggctgaagttctgggattgtactccccagggttttctggggcttcaccaaggtttccaaattgatagcaacaggaggcaggcaaatgcctaggcagataggggtgggtccccagtgaaaccccacctcaagtggaagagagtttaaagcctgaaagccaagctacaagttaaatcctcagactggattgagaatttccctttctgtttggtaagctctcctctgattggtccccacccttcacctgttttacatatacctgcgctttcctaattggttttctacactgttgtgcccacctttgagtggtgtctttgctttagacttatttgcagactcacaaacaaatcagcaggcacttcccattctaagtctggaaaaggccccaggcccagccacacaggggaactttctcaccttcaggtagggagaccaaatccatatcccctcttcgctaaaaactgttttcgtcactcagtaaaattcttccctgccctcctcacctttcaatgtccagtgtatcctcattcttcttgggcatggtacaagagctcagggaaccaccaaacacgggtacaagctataacacaagaagctggagcacaccagcatggccaagcaaggcctggtacgggcatcactggccaggggttcccagcttgcaaagtgactgagaagaaaaatcctacatcaaaatcatgacttcagtctacttgtctcctgattgtggggaatattgaagggaaatcccataattttgtcaactcaaatactttctccaatctgtttctgacagttgaggtggaagattttgatgcaacttcaaattgcatgaaaatcatctcctatttgctttttcaccttccctcgctccttcctgccttcctttttttttttttaattagtttcctcttttgaattttatggcacaagtttgtgcttaattccttatttagagcttactggtaaatttccctttttttttttttaaccatgattttatggttattattgttccttttgttaggtgttgatgaaggaggaagggagattttttttcttctgtattctgtcacctttatcataaagaaatagcccctttagaacaactggctgtccgggggcgggggggtgtgggggagaaaaaaaaagaagtagccactattttgtgctatttctttcctatttccattcttattatctttcttcaggccctaactaactcatacttcctgggttctgatttcagccagtcccttttgtaccacataaactggcaggatggctttccttaaattcagttcctgacattccaaagctggaggaagcccaaacatcttggcctatgcttccaagacccttggaaatctaactttgccttctcttcaacttatcccttgcattcatgagccatttgcttaatcgaattgcctccttatggctctcacagggaaccaaattattcccaccttttcactttcagattgctgcctttggtgatttctcctttgcctcctcctttattctgtttaaacttctcgagggcttttctaactactccaggctacaataatcctcctcttctagacctcaccacacatatgtttgagtattttaattctcagaataacaggggtgaaaagtctctagaaaaaccgactgcatttttaaaatgcaggtgaatgaatgataaccgtagtgaccatttttatttcttcctttgtctcagacatgaagctaagaactttccatatagtaacagctttatttagatacaattaaaataccatacagttcacccatttaaaatgtacaattcagtgatttcaggtatattcagagttgtgtaactgtcactacaatctaattccagaataatttcatcacccccaaaagaaaccctgtgcctattagctgtcactccccattcctccccttccataaccctggaaactactaatctactttctgtctctatttgcctgttatggacatttcatataaatggcatcatacattatgtggtggtgtgtgccactgtcttttccatttaccataaagttttcaagggtcacccatcttttggcatgtatccgcacttcatttctttttttacagcttgattaaggtatgattcacaaaaattatatatatttaagatatactgtgtgatgatttaacatacgtatacattgtgatatggttaccacaaccaagctaattaacatatcctttacctcacgtagttaccttttgtgtgtgtgcatggtgagagcagtaaagatctactctctcagcaaatttcaagtatacaatatattatcattagccttagtcaccatgccagacattagagtgccagcacttacttatcttataactgaaagtttgtacccttgaccagattattcccatttcccccatgcctggcccttggtaactactattccatgctctgtttctaacagtttgaatattttaggttacacatctaagtaagatcatgcagtagttttctttctgtgtctggcttattccacttggcataatgtcttctagttttatcatgtttttgcgaatggcaggattttctttccttctttttaaagagtaaatcgtattccattattgatatatacatcgcatgtctgtatttatctgtcagtggatacttaggttgatgccatgtcttggtggttttgaataatgctacgatgaacatgtgagtggagatatctcttttggatgggggatttcagttcctttggttctatatccaggagtgggattactagatcatatggtattctatttttaatttttgaggaaactctgtactcttttccataatggctgtacaagtttacatttctaccaagaagggttcccttttctacacaccctcagcaatacttgttatcttttgactttttgataatggccatcctaacacgtgtgagatgatacctcactgtggtttttatttccatttccctgaagattagtgatatttcacattttttataaacctgttggctatttgtatgtccccttcggaaaaatatccatgcgggtccgttgctcattttttaattgggttattttacaggggagggtactattgagttgaatgggtttcttatgtattttggaacttaatcccctgtctgatatatggtttccaaatatgctctcccattttgtaaattgtctcttcactatgttgcttgttttctttgctcttcacaaacttctttttattgctaaataatattccattgtatggctaggccatattttacttatctgttcatcatttgatagacagttgagttgtttctactttttgcttcttatgaataatcgttctgtgaatgctgctgttaatattacaagtgtttgtgtggatatatgttttcatttctctagggtatataactaggaatagaatttctgggtcataaggtaaccctatgtttaatttttgaaggtacttccagaccattttcaaagcagcgttgccattttacattcttaccaatagtgtaagaagattctagtttcttcataccttcactagtacttgttattttgtaactttttattatagtcatccgaataagcaataagcatgaagtggtatctcattgtccttttgtttgggtgaggcatccctgatagctaatattgagcatcttcccacatgccccttggtcatttgtatagcttctttggaggaatgtctattcagattctgtgcccatataagttggattttttgtgtttttattattgagttggaagaggaattttccatgtttaactcgtaatcctcacgatacctctcccgagattggcatacttacctttgtcttgcaggtgaagcaattcaagttcagattattcactcatttacccaaggtcccacaggtaggaaggatcaactaaagctgaaattttaaaacctagaatctttccaaataccttttccactctcatattcttcactatttcactcagaaagtcaaacagtgaagagtaaacatgacactaagacatgttagaatattaaagttcagacaatagtttagaaatgagcagacttaatcctgtgaaggaaaacaggattaaatgagaacagaaacaaaagcataaagacaatgggaggttacgttaacagacaaaacagtaagaaaacttttgcttctctgcatcctgttggtcatacacttggaagaaatataaacaaccccaaggttatcatatcaaagaaggactgcatagattttaaacagtgtggcctggccgggcgcagtggctcacgtctgtaatcccagaactttgggaggctgaggcaggtgggtcctttgaggtcaggagttcgagaccagcttggccaacatggtgaaaccccgtctataccaaaaatacaaaaagtagccaagcatggtggtgggtgcctgtaatcacagttactcaggaggctgacgtaggagaattgcttcaacctgggaggcggagcttgcagtgagctgagatcgcaccactgcactccagcctgggcaacagagtgaaactccatctcaaaaaaaacaaacaacaaccaaacatatgtggcctacaacaggagccaccccgtcttgggatatacacatggtaatgagacatgggggattcaagtgcaaggagatagctcagtgtgaagtggcaccagggatggcatctaggggagtcaaagcaggcacaagggaaggagaggtatttagttttgtctgtatcaatttaagcatctttgtttggcaacttcttggatattgtaggcctatcatctgtggactttgatttagtcagaggagccaatacatcacgtggttgaaggccatgtagcctcacctgttctgcggacaggcctgcacaactgctgggaggaaccattcatgggaaagagaggctcactctcctcatgccctgtggggtgagtctggggctggagccaccaagaaagtctgttgcttaagtcattcttgctgtccaggcctttacctcagaggactgtggctaccagagtggggaatccaacaggctgcttcatgctttgcccctggtgattgtgccggatgactgtgaagagcctctgctctgcctccatggtgcctagcacaggggttgtgggcaaacgatacctgtgggccctggcctagttttgtaagtaaagttttactggaacatggccatactcatttgtttacctatggccggcaaagcctaaaatatttagtatctggacctttatagaaaacgtttgccaactcctggcctggcagagtgctaggcctgcaatagctgattcttttttttgtttttgttttttgagaaggagacttgctttctcacccaggctggagtgcagtggcaccatcatggctcactgcaacctccgcctcccgggttcaagcagttctcctgcctcagcctcctgagtagctgggactacaggcgtatgctgccatacccagctaattttttttttgtttttttgtattttagtacagacggggtttcgccatattgcccaggctggtctcgaactcctgagctcaggcaatccgtccgcctcggcctcccaaactgctaggattataggtgtgagccactgcgcctggcctacaatagctgattcttaaaccttccattgacttgcatcctttcaatatcacctaactggcacgaagctaggcaagcctcatggagccaaatttgtattagttccacaaagacatgctctccctagatgagggctccttgagggtgggtgctagcaaaagccacaaggccattatttaccttaagagagttcagtcctttccatgcctccctactccagatgtgtcagcctttgtccagccattctctgcctgctcagatgagatcattttccatttgtgaaaagtgtctgagaagttcagtgtttgacctacatcatctcatgtgcccgcatgtgaccctggaggtaatgtcagctcttatttctgaagtccattgtgagtggaggagcaaaatgcagaaaggttatgtcagttgcccaaggtcccactttgtcttgtgctctgggtctaaatccaggctgggaggaacatggaggagtgaagagggatgtcaccttgtaatgaagagatggcagtgaggactctgatggtgggcagactaggggaagacctttctgtttgttttcagcttgccccttagcatctcactatcctcattgataaaatgaagctaaggctgttttctaggtcatggaggaggattctatctgacaatgtctattaattgcctagtataatacctggcatgtcatgttcaataaatactaccagccattattattgttgtttttgcagctattattgtcactgttgttattttactaatgtcggtgagaaatcaatgtctgaacttgaaatttctgtctcttcattcattgtctggtgttgtaaggtcacatggctgcaggagaaagacagagaccataaatgacaacagtggactaaaagtaccaaaaaaagaagaaaaaaaaagattctgtagaggatatttattatctaaatgatgcagctgcttgttacattctagttcattgttgccaagcccaaatatgggactaaaattgccagatctaatatttgtttcaagaaatgttggaaatctgtttttaacattggtaagcagtgtctaccaaatacacacacacacacacacacacacacacacacaaacatacacacgcacacatatatacaaatatggtgaaatactatcaaatctgaaggtcatacatattgactgccccttatctgaaatgcttgggcctagaagtggttcagttgtcagattttttttggattgggaaatatttgcgtatacatagtgagatatcttgggaatgggacccaagtctaaacacaaaatttgtttatgtcttatatggacctcgtacaaatagcctgaagataattgtatgtaatattttaaataactttgtccatgaaacagagttttaactgcatttttactgtgacccatcataacactacatgtggaattttccagttgtggcatcatgtcggtgctcaaaaagtttcagattttgggctgggcaccgtggctgatgcctgtaatcccagcactttgggaggccaaggcgggcagatcacaagttcaggagatcgagaccatcctggctaacacggcgaaaccccgtctctactaaaaaatacaaaaaattagccaggcgtggtggcgggtgcctgtagtcccagctactcgggaggctgaggcaggagaatggcgtgaacccgggaggcggagcttgcagtgagccgagatcgcgccactgcactccagcctgggcaacagggtgagattccctctcaaaaaaaaaaaagaaaaaaaaagtttcagattttggagcatttggagcatttcagattttcagattagggatgctcaagctatatctggtttgcagcttcttatataaatggagtaaaccttcccctgggaagaacttttctggtaagctgtgcttatatttgttcatgtctaaagatggcttcattatttcacttgagcatccaacaagtatttatcaaataattctcatgtgccaagcacggaactgagtatttagagatgagtcaggcagagtctgtccccttgagagattcttgatgtagttggaaggaccaacataccataaaatgattgtaatagaatgtgataaatggttatcattaaagccatgaaacctgctatttagggaacaggaagaggaaggggattctggaggaagagacatttgaattgggtcttgaaggacgagcaggagtttgcagactatagggagggtgtctagagctgtgctgtgcaatttggcagcctgtggctaaatttaagttaattaacattaaatgctttgcaaaattcagtttctcgatacagaagcaatagacagtgcagaattagatcatttccatcattgcagaaagttcttttagactcagctgtggtgtaaataaggacacagataccccaagactatataaactttagaaccctgcaagttttggggatgttgctggagtgataagaactgcagttggaaaggtgggtgggaggcagaccaagaggaactgcatgtgctaattcagcatggtttgtcacagcctctgactttgcttgactctacatgctaccatcaactcaccctcccaatcgttgctaacatgtttctggcttctttccttgttgcattcagatatatcacgtggtccaaaaaaagcaacattacacttgcgttatgttccagatttcgtcagtaatgtcatactcgtattcttgcctctgatactgcttgtgaatattaaataccttaattattttctttcacagtaataaaaattataaaaggaaaacacacttaaatttattttcatgccatgctggtccacactgctgaaccatatttggaaacttacaaaatcattgctatggttatgtattaagaattagtaaaattatttcattatactttcattatttcattgtctctttgcttgtaacagatttaaaaatataggatgaactttaatttagtactcataaagagaacgagggagatttatactaacaaactgttaatttaatttctgagttactcttggtgctagatgaacactaactaccctctattattctgattttcagtcttatgttgaattgatcgcagttaaataaaggatgctatttggagtttaatttgaaaattctaggcaactcttttgtaagtgacagttaacacatattttcttttagatgagttcttttttctctgactagttcatgtatatgaactgtttatttcatcgatttattcctcagttatctattcattcaacagatgtgtattgacttcttacattgtgccaggcactgtgcttgcttgggacacagcagagaacaaaacagtcaggttctctgttttcatgaagctgacactccagtctgggagggatgccagtgtacaagcgtaaatgagcaaataaagctctcagattgtgcctcataatctaaagacaagaaaacttgtctgactacacaggtgaagattctgtgcagtcaaaaaatttctctgacgagttgactttaaaccacttcctgaattatgtgaaagtgccagccatgtaaggatctagatgaagagcattcccaggccagtgcagaggctctgagaagcaaaggaattggacaatttggttaaataggaagatgaccgctatgattgtagtgcagagttgagcaggtgccagactttgtaagatgttttaagcccccgtgaggatgttagcaagttttaaacacaagagggatgtaatctgattaacgcctttaacaggacatatggttattgctctgtggagaatggaagttagaggtcaagagcaaaagcaaagtgactcattagagatgttgatgatggtggcttaggcttcatggaaggagagaagcaagtggattctagaaatatgttggtgctggtcaagttgacgtaacttattgttaggttctggatgtggcatcagttacttctctagggaagatagggaatgaaggaagtgggacagatttattggaagtgtctgatgtgctagatgcccaaataagcaaagtcatgttctgatatgtcttctctgttcaccttgctttctgactttaatattgaagaaatatttgctctgctgtgaagaaaaatggtagctgacctgcattaatatctgctattatagtgcattcactccacaaaaattaatatagcccctgctaagtactgggaactgtgctaggcactgaagatacaatgattcctacttacctggagcctccagtatagtgaggaaaacatttagcaatgagtccacactgctctgtgttccgtgctaatccaggatttctcagtcttggcactactgacattttgtacccgaagattcagagtttggggagtgagagtatgcatagtgagatgttttgtagcattcaggcttctacccactagatgccagaaacacctcccacccagttgtgacaaccaaaaatgtctccagacattgtcaaatgtcccctgtgggacaaaattgtcaccagttgagaacccctgccctaattccagcccctgatgtctgatgacagtgtagccaagttctgaagtctgttctcatcacctgccaggtttgaaagtgtttcctttcctgttagtggtagagccaaactttcaatatgtgaaagcagctggtagcacttgggatgaaaccaaggtttccttttgatgctttattcactttggttagaagtaggattgcatgttattagcagtctgggaagtttggagaagtccaagtgattgttttaagtcaagaatgtaccaaattgatcactttgcaatgccctgaaaatatgaatcattgaaagactttttgatctttcacggtccaaacatactacagaaccaccatcgcaacacatcacatcttggtggtagagtctatccagttcactgattcaatcatataaagaactgtgtagatttgacttgtcccactccaccactgcttgtaagttttacacttgagttgaggagcagattctgaaacacagatagcctgatgggcaaaagacaagccacaactctactctgcaatgccaattagcaacaatggcaattagtcctcctggttatgatgctaatgtttatgaagtgtaaattatgtgctagacattgtgaaagttgccttaatttatttaatgttcataataacctcataaggttatgttgttatgctggtaaggaatagggccaggattcaaacatccatatgtatttagaatctatgatcattttgtttgtttgttttttgagaaagggtctcactttgttgcccaggctggagtacagtggtatgatcatggctcactgcagccttgacgttactgggctgaggtgatcctcttaccacagcctcccaaataattaggactacaggcgtgcaccaccacaccaggctattttttgtagaggcagggtttcgccatgttgcccaggctggtctaaagtgatctgcctgccttggccgcccaaagtgctggtattttacaggcatgagccactgctccctgctggaatccatgttcttaatctctatgccaaactgctaatttcccatgctgctgttttccactgagtttaaatatggcctcggactcctcaacaagagctactgctagttgatcagagaggcatttgagatgaaaactctttgcccatcaatacctaatgtttcttcctagtcaagtattaggcactgaattcctctgaggcggatcatggggctgctgtggacgcataggagttaatatcacgtaaatctgaaagcaagggggaaaatggttgaactatatctcataagtaacttttcaggctcccctgaactttaatcagtggaaatggtattgtccagctgctttgttttattttcctttttccttttacaaaggcagttagaacacacttcctacaaaaatgctgttcagcgaacttataatgttgccatattgctggtcccagactttcacccttggggacattctcctatttctccattaatgggagatgcttttgaggatcagttctagggatcttttttccatattagagcatataaatccagtttagtttactgcaccaatcagttcatgttatattcttttcttcttgtttggaaagagccatgtacagtagtctaaaacctgaaagctgaagggagatgcatttccctcttattcctgccatcttgctccttattgaactactggtagatggggcctgggatgcaacaccagttgacaccttgaagctgggattggttctctgtgctactaatgaataggctacagaaacaatttgctatgtttccctttggatgtcctataagcatcaaataaaacaagtggaccaatgccaaactttagtcaggtgaaatgttcggtccaaatgttgcagcataaagataataatattgttcactgaccaacacaactgactacatatttatgagttttttagatatagttttaaaatatagtgtgttaactttgactgtgtctatgagtaattcagctttttaaatatggcacttaaaattctaatttaaagtaagtttaaatatttcctatcttttttgtataaagtatgaaaacgcttttcaaggatcagtgttttcaggctgcccaaatatgaccaaagagcatgttctttgatttgctgttgggcaatatttttataattgatgggtgggtggttcattttgaaccaagtcttcactttgctctgggtttcgtctttagcaatttcccatccccatctaaattatatttttatgacatacaacattaattaagattgtttttcctttaagaggtgattaaacatatcccccaccattggtaatagcctgattccatatagcttcacagcactcactgaggaatactactttgtaatcttgtttctcgtgttctggcttaattttccagctcttaactctggctaaatagattctaccccctaacctctataacactaagcctcaggaaagtgatcactttaaatttacagttgttaaatagattgttaatgaccaaaataatttatcaatcttggctggcaggcattatatttaaaaaagcagacgactaatcaccaaatgctttgttgatggttattttcatcacactgactgccctccttggcatggaaagccattaggcaggagagataggagacaagccattgtggcaaagtggtgctgatgctgggaactggactcctgagcgcaatttgtcagtttgcttaggaggttcaaagctcgctttgttgtgctcaaactttactgcctgtttgaccagctatgtccctcccgatgatgtaaaaatctgctagtttctccttttgttgttgttcaacttgtatgatatagggtcactatttagacagagcctttaggtaagtcaaggatctcagaaggtatggacttggctaaattgagttatagatggactattattttacatcaaatcattgtcgaatggcatctgtagcttttaagtttactttcatctttttgtttttagtttggagacaacgcagtttcatcatgtctgctttctaacgtctctttaaattcagaagtcccctaagaggcagctcttcaggaaaaatctaaacagaaatctcagagtgcatgtggattccttgttccccagagtcttccctgcaaggatcctttaaatggatcactcctcatggtcatgtaaaatgattttacttacaagacatccaggaatatccaatttttaagaacccatatgttttataaagcaagggcacacctagccctatgtgaatgcccatcgaagagatgactcctatgtatgcctgctgctgggagacacaaaggcccactccagacctaccgtcagcaaggttcagaatataggcacagtggcttcctggtgtgaagaaattggctaaggtttgcctcctctatcatggaactcttaaatttttgtcctgttggttcatctgtgatgtcggggggatgactggcttagaacggccatgccctgcacatttgcagcctcagtccttctcaggttgcttacccatctgtcctcttctacccagcaatgggaattcttctcactggagccccgcttagcagcctgtgtctttaccaatcttccttttcccttcatgcagaataaaccactcccttttccatatcatgcttttcctggtttgtggttagttgtccatggtagcctccttgagggaagaggccacgccttcctcatattttgtgtccttggttcctgatattttgcccgccagagttggcaactgaccccagctggacaactggaaggattgatcaactatttttaaaccatagcttttcaggtcttaggaaagtgtgtaagtccttggaggggctggaacatatcccaccaatttgggaacctacccttgaggagtacataacccttattctgaccttacgttgcataaatgctgagtgcatgcttgtgtaattaaatcaaaattgatagcagccacctaatgcagtgtgctgattaacttagggccatctcttctcaaagtgtgtgctctttgttcttcagaatgataacagattatgagagccagtgttgggggggagaaatgaaggaaattctatggcaagtaacattgaaaaatgctcagctaagcaaaattaaatactgttctttattgaagaacttctttgaccttagcattgtacgtgaaactaacggaagagagataataagcagcatttccaaagtactttgaactatgatatttttattataatttctctctctcttttgagcagctttttggtaatagtgtttcaaagatcatacttgggaaacgctgatttaagactgctaagatgcataagctggtttggctgatttcagagtaataaaaggcaatagttaagcgggttcccattttgcatatgaattaacataagcattgggaatgtaacagatgaacttcagaacttccccaacaggaaatgaaccgaggcagcacagagtgttcaggaaccctaaacccagcctttccttgaagccctcagtaaggcaggaaccagaagtttcacgggcagcccttttcttttccagtgtttggccctctaggcaatctgaaaaagagtcccagattgatgctcagtccgtatttatggccattctaacatgaggaatgtagaaaatggagaaccagctatggacaccaccaagaacgcagatctaattcccaccatggagtccccacagggcaataatctgcttagatcaaaagaggcctccagagccctgcaggctttatcctctcaaagaagttaatttcgtacttggaaataatgaaattactgatagatcaggctggaatctctgatagttaatatcatcccatctctatatcctatgacagtgctgttaacttgttgtaatgtgatattttgagcactgcttagatattattttttaatgacgtcttcattgaaggcctaaagctttgcctaagattctaaggaaagttttcacatgaaagagagagataatattaaacagacactaataagtcctctgaagaaaattcattacaatatcattcgcaaaagaaaagaaggaagaaaagaacaatacccttttccagccaatgtatgttctctcattaggattttacatttattactgtactgttgctgcagatttttcttatgtgtgtgcttatgaacccatgaagaattagtgtcttcttaatgagcaccaaagactgtatttattaaaaattctttgaccttacgtaaaaaagaaaccatttattagcaattatgtcttaggattagaaagtattatcttttgaagcattccaaccacgttgtagtgtcttctcctacttgagctttcaggatctctttgagggatcctcctctctgttataaggagggtaagtttttctcaagaatgcaaatcacttggccatggttgcctagtgagtcagagaccatgctaagggtctcaccttcgtgatgtaatttgagggtatggggaggcttcatttatctgaggatagttttcctaatggcctgtggtacgtgtgctagaattatgattagagattcatgacttgtccttttaggaatccagttaagaaggcaaatttgggagaggtggcccctattatcaccagaacctttgaaacaattgggactggatggatgtcagacagtatgaattagaaaggctggactgcctcttgatgcctggtgtctagtcccatttttattggccagtgcccaagcattgttgaatatctttgaatatcatcccaggttagtagggaaaaattaagacaaagggtattactgagaataggatggtgctctggtttgaatgtgtttccaaagtttatgtgttagaaacgtaatccccagaacaacagtattgacagatgggaacttgaagaggtgattaggttatgagggccctgctgtcatgaatgaattgatgttgttatcatgggagtaggtttcttgtaaacactagctcagcccttctcaccctctcttctggctatgtgatgcctttcaccatgttatgacatagcaagaaggccctcactggatgcagcttgccccttgatctgggacttcccagcctccagaaccatgagccaaataaatttctgtttattataaatcttccagtctcaggtattctgttaaagcagcaaaagcagactaagacagatgagaaacacaaagccaaactctgagtctttctaaaggtcatgttggacaagccatatcactggtggtatggagactaggacccagtcatagccctgtgatatttacctagatccctcaaagaaaatcaataaatatagaccatttcctttctgatatagagctaatgtttaaaagagaagggtcttgattttttcccatatatttcactgtacagtgaagagaatatataccagtgaataatatatggtccttattataatgttggaaataaaatgaatacaattgtgcttattgtatagttcacttgcatcattgctttgccttcaatttgggccttttagctgttgtcagataaaaggctacaaggaatttgtctagtttcagtatcacatgcaatgtagatacacttttctccttattagaacaaaatttagagtattttttaaaagatggttctctatataagctatgcatgactacttttaaaattatagatcacagttaacatagaatacagagccacttggccaagctaggtgagtacagtgaatgtccaagcctgaattattgggtatgaatttgttaagagacaacttgttaaagaaagcatactccttcctttcttctttcagagtgccccgatggcaacagaatccttgaaatcctcagggaacaaattggggataaaagttagaaagtacacccgtcttattttccaagctctgagcagacccaagaaaaaagactgaatttaatcaaaaaagattttattgatgaaggtatctctccttcaggctaaactttggcccctgcatgctaataaaaccctctcatttctcagaagtagctttctgcataaaatccagggagagaccatggacaggaatacatcttggagaaagggaattgaagacgatcaatcagaagttggcaaggtctcccgctgtcccttgctgagttaggaggcacttgcctctctctgggctggctgatttttaattcttgggcagtcacctgaatgcctttggattcttgagaaagtgtaggatgtgctgctggatgcaactgcttctctcagctgatgctggctgagctctgggcaattgcaccctggtattttacttctatgttatctgcacacgtggtacttttactgcccagatatgaagatgagcaatctggagcttcaagtttttatgactgctaattagtaccctgtttgtgcccttttaatctgttattataataggatggcatgacatgcagttttttcttggctctctgactgctgcagccagagggggctgtatttgcactttctcattacctgtgcgcttaaagaatattaataaagatgagtttaaaagggcaatgttctgaaactttctagtcctcaccacaaatgtggaatttagatcctgttcttccccaggcttttggcccaaagatggtgctcagactccagcgaacagagatgggccatgggaaagattccactgctactgttcttgctctggttcgtttttaatatgagataggaagagatgggggatctgcgaggctatgtcacttgataaagtcaaaagtgaattagactgaagttcaaattctgggtctttggcttattatctaggaatccctgcacaattgcttttctttccatgttgttactttcccccttccaagcctccctgctccatacacacttagccaaccagccagccaaagttatttactgactgcttaggtactcacttctctgagtgccacaggaatgcaaattccatgaggtcaggggccacatttgtctggttctctggtagccctgcagcaccatttctgacaaatagttggttctcaataaatgaatgtctaatagacaaaaaagacttaatttcttgtcctgtaaacaagtatcagaaaactgtctcactggactgcggaaataattgactagtaattgctgtggtttggatgtttgtgccctcctaacctcatgttgaaatttcatccccaatattggaagtggggcctcatgggaagtgtttgggtgatgagggtagatccatcatgaatagattaatgacctctctgttggtgagttactccctactctgttagttcccatgaaagctggttgttaaaaagagtgtggtgcctcttcccttctctcttgcttcctcgctccccatgtgatctctgcacacacagccccccttcacccttgccatgagtggaagcagccagaggccctcaccagaagccaaggccaataccaggcttctcgtacagcctgcagaactataagccagataaaccttcttctcttcttgaattacccagcctcaggtatttctttatggtgacaactaaacagactgagacagtaacataatacctgcacagtgtctggtaaatagttggtcctaattcagtgggagtgaagtttgttctttcctctgactgtaggagctgggatgctcaggtgaaatgtggcctcaggctcacctgggaatgagcgagtgaagttaggagaggtaagaatgaacactgcctttttccagactgtcacatatgataggaatgtggaggtccttgcttctgtcattctcttcatttggtagaaattgttctgtaaccacagagccacaggaagccactgcgatgctatgatattcagaggtccagaaagctgccttagattctgcatatcagagcttgcccaatggaatggtgttccccaaatgtgtcttttgccttgatcccataaccctcctatccttgcaagggattgcctggcattagcttctcttagggccagagttctgaacatttcaagaaaaactagcaaatgtgctcttggttgaggcctgcctgcctgctagttttactcaccctgagtatgtgcgagttcatataagtcactatgggaaacctggcacgtgcttgcaattcccagtataaagctgatttcttttggaaaatgaaagcagcgctcatgtcctttatacatgccttgaggcttacatggaaagaagtcagaggaaaaaacccacctgttggtgacaccccaggcacatgtatttcagggactgaaaaaaagcagcattcaaagtagcagagctttgcaaggatgatgcagttaggatgtgaagctggctcttgaaaagtggatgatcaaacagagcactgtactctactaaaccgaaatccaataggctgcagttgctgatgttctcattccatcatgaattctcagaatagcttggaccaaatcaaatcagagacatcaatcgttaaaaaaaaaaaaaaaaagcatcaggtagcatgtactttctagaagccctttagggctgtttctgagggcatttttgttcctgcggtcactgtatccttcagactatcttcagtggagaggacacatggcagcccctcgtgctcaatgctgcttcctgtttcttcagcaatactttcagtgtctgaagatgaggttgaaccatgatgaagctgtgatctccagtggctgagcccaatgctcatcctgtttcctcttctgaacatatatagaaaatggactttgtgtgctaccaaatgatcctaatagcaaactgatgagctttcttttgcgccataagggtgataataaaaggaaggatttgaaaatatctttatttgaacacatttttaaaaattagcaaatctgttttggcactccatttttgttttgctttattttgttttggtgaatttttcttactgctctctgaaatgtaaaaccacaggaatagttgacttaagttcatttttgtccttgaaattaaatgttacagttataaactatttggatacaatcaaatattgtacagaatcttttaacattattgagacatacagagtgcatattgtcccaaggatctcacattaatgacctttcagtttaatactatcctgctatataccctgtaactacttctcagcagctcattggcaactgacaaggtgttgacttctcccattctatcctgcctgctaaaagtggattttcctactgtcccatagcgtgactcccctacctaccctcaaaatatgagaaagagctttcaaatctgtcaccatctggtagccttgcttttggggaagtagctggtgtagcttggcattatagccaaataaataactttagagataggaaatggttttacggaacttcaacaatgacacaataaatgtcttagcctctagtttccaaccataataaagttgtccctagaaaagttgagtggtcagtttttgctgagatacacaataaagtatatctttattgtgttgatatccagtggtgtgctggtaaatattaacaactggtttttgtgtatgcatgtgtgtgtatgtatgtgtgtatatataaaaacatatatccacataccctcatacatctgactgcttattataaattttactgatataaaatgtgcaccacacaatttgtgagtaatcataaaatatacaccaatctttatcatagattctatatagccaatttgattctcacagaatgcttttgttaatgtttgttgaattcctgtaatcacagtcaacttatgattgtgattcagccatgatttgaaaattcagataaggaataaatgcttggttactacccaattaagcaaagttgctcatgtcactgacaaaacaggtgtgcttcagacatgaatattggttgacatttttgtttacataaacaagacaaaagtgaagcctaagaatatatgtcaaaactttactcatttgtcaatcatatgagtgacatttttgccaaatcagataatagatatagaacactaaagggtattttcttaattttttgtactattcaccatgtaacagctattgacacaatatgcttttaagctttgtctccataatcattattttcccccatcactttcttaaatctagatagccaagaaaacagttaatctgtagtgtttccagtttccagttcatatggctgaattgaagctacaaacctgatgtcactgcacagacttggaaagagacgtgcggtagcacactactgagagtatttccaccacaagatacaatagatgttgatatggtttggctgtgtccccacccaaatctcatgttgaatagtagctcccatgattctcatgtgttgtgagacggaccctgtaagagataattgaatcatgggggcagtttcccccataccattctcgtcgtagtgaataagtctcctgaaatctgatggttttataaggggaaaacccttgcacttcgttctcattctctcttgcctgccaccacataaaacatgcctttcaccttctaccatgattgtgaggcctccacagccacatggaactgtaagtccattaaatctctttttctttttaaagtacccagtctcaggtgtgtctttatcagcagcatgaaaacagactaatatagatgtatataacctaagagcatagacaatagtaaaatgtagtgacattatgaggaattacagagtttttaatattttcttccctttgtttttaatatttattactttcaaattacacaatttaatttttaatggctttttaagctaccagcttacaaaatttctgaaaattatacaaacagctcttgtgatctggtacaaaccagctctcacacatcactgcttatatcctccttatatgggtcctgaaataagcaggagacccggaaaatttggaaagaatggaggtttgctgacctagtaaggacactgccaagaaaataatttccactgaacattctcattttcctcctccgaacagcatagtcatggccaaagtcattttagctttgccttttatcagcttaagaaactgtagatcagctttaggcttatgtgttcaacactaaggaacatgccatgtttcttcagtgacaaaggcaaaaccaaggctgatataggaaagcaggaccaatggaccaaggtgttaggtgtcatatgtttttgggagcagcaccatttgccagggcatctgtcttcttcctcacagtgtacttcagttttctacatgttcctcctaccaatatgaagttatttgaaactcttaacccctctgtacctccacctactttccttgccagacttctccttaaaacatttgctttgtagggatgtgaaagttatctctttgattgagataatgtaattaaagggaaacttgatttccttgccaagtctggatttctctaccgagtaccacctcagggatttctaaaactcaattacagtctgctctgcttgttagtgaaaacaaggtgctataacgatctctcttcctgataatctgttttctgcatttaaatattgttaatattttttttccttaatccagctaattgaagatgtgagggtgtttcaatagtatgattcctgaaatttgtttcataaacgatattaactttatacttccaaacatgttaaagtgtgaatatgttttaaatgttttgtcttccatatctaaatgtattttaagacttttacattttgcatttcctaccagcagtgtgttttatactgaatgcaggcatttcaaaagactcctattttgagcatgtctgtgcctgaaagtatgcaatgctaatttgaacagtaagcaatgtaaacacctcatatttaaaaattggttgaaaatgagaaaaagtactattttagtgaaaaagaaagtaagaaataaaaagttcttcatgtgaataattccaaagcacctcatggtaaatttttttctcctgtcccatattgctattatttagtaacagaaagcttgcctcatctaatttattggagagaaaactggcacattattgtctaccagaaatgatatggggacaggtttatcttatttcaatttgcatttaattaatgagttacaccatatattaatcaaagcaaatatctttagaccataaccaggcaaagatctttaaactctaatattctatcctaatgtttttagcctcttcttgtattaaacttaattgtattttttatttgtctgaagaaaaaaatggttatatgcaaaggaagtgagggtgatttgaagtcttcatagagccagttttttacactggagtttgtggttgatagatttgttttgttttgggaggtccttcaacctgtagaaattatatgtgaacatttatgtgtatgtgcattttcctcagggttctattagaatctaacagggggcttgtgatgctctgaagtttgaaaatgactgccttataggaatagtgaagcccactttccacactaaaatgatttttagtaatgagctattgcccatacccccttcctttgtgtctcttaaaagacatttttattcacaaattctaatcaaagggtaaataatcaaatatgtttaaaaaagatccaaatacttggccagtgtagcaaaaatcatacatatggttatcagcttgtaatgggttggaacctggcctctctagaagcaggtatctatagccaggtggtcttactatcattttgtccctactgtgtggcctactggaagcattcagttgcatgattaggggatagatgaaaagagaattgttgagacgtggcaccaaaggtacagcgtcattgcccataacatatgtttatacatcaaacatgtttgttgctttagggaatacatccattaatctatttttttttctttcactttcaagtgctgttgagatgtcaaaggaacaatagcactgctattccaagtgccctcaaattggaagtgactgtatttattggcattgctcaaagaggcttaaagaccaatacccattcattccatgtagtctgagaatatggaattagaaggagcacaatactgttttggctaatggtaaaataaaaacctggaatgatgaaggtgactcattgatctaacgtctataatcatgaattaattcactttatgtctgaattacctctgttcttgctcttataaaaacagcagctgattgatggattcctgtatgcctgatactatctcaggctctttacattgataaagtgatttagtcttcaaaacgctgtcatttataggcattgctattctctctgttttacaaatgagggacctgaggcacatagaaattgagtgcttgcacagtgggacacaggtacttagttgtggcactagattcaaggctagtcagtcctgtatcccagagcccaggattgggactgtgcttaatccctactagagaagagaaagtgctagaagcctggaaattacagtggtccagacagacatggttctttctgctatcgatgaagctgatagagaccaaaggggtggtagtagaggctactttgaaaccgaagggcaaggcaggttccttggggaagatttaagctggatgaagggaaggagccagggaggagagagatccctgagagagagagaagagcaggcacaaggtcttggggagggaaggcgcttggagtattctacaaacagcagaagcaggaatggccaaagacaaacgagcagaggggacaggcaggagaccaactgtggctatgtgagacttcttaaccttaaaacctaaagggatgtcgttatgaggcagcttcttggcagtttgatgccatgcttctttgtccctgtgatctgaagccatgatcttcttgcagaagttttctatcttgtgttctgtctttgattacctcctatttccatatggacttctccttctcttctctcttggttcctttggatgtggcacttggccacgttgctaaggggcgggggagggggggtgggggaaatgattggttaaaccattgaattaaaggctcagaaataatgtggcccaaagagtcttaaagaacataaaagtattggaggagagttcattaaaccaataactgagccagagtcttcattcatgttatatgaggaaccctccactatttagctgtttgtggacccagcaattgctgtgattatcccatcattgccagtgtccaatataatgtttgtatccagactgtgttattaactttatttttcatttattcgaccctacgtaatgttaggtcatttgtgttttgtttggggctgtgtgggttttttttggagcagtccggttttgtcataacatgcatcacatagttaagatttcatatctttgcttcatctaccccattatggaaaatggcagttgattagggttttctttagatcattatcaattgttttctatcttgcagatagtgctgttaggacacatctatcataccccagagatcctatatagctcgttatttctgagtgatttattaccttactgtggaaatgtagttagtgaacgttggggaagcaggggctgtattgagaaatatcaatgtatcctcatgttctggcttgcagtgacagtcagagatccatctcactgacagttaccttgttaacattttgatcagatggcaaatttgtcatttttcatgataacaagtataagtttgcacaagaaccacagagagatgagaaagataaaacagccctcatttagtttttctgtgtgatgtaatcagtaatctctgggagaagtgaaataattactgtgtgagaagctcatccactggaaaatgtgtttgttgtagaaagctcagatttttcttcatttggatagaatgtgccctttcttcttcttcttttttttttcctttgctgacagtttgattaacacaccaagcctatgcgaaatagacagaaaaaaagggtttacagtcagaatgcttgggtttaatcacagtataagatatgaacaaggggagtaaaaaaaatagcatgcagaattgttgggaacagtgaattagctgccatggggatggggtttgggtgtttcctccttctacattttaaacttgctctcaaaccctttctcgttagcgtcaatatcgagtaatgaatgttcttctctaaacgctcgtcaataactatgaggtggcccatctggaggcctcactcttgtgtgatcacacagttaataatgtctttatattgtttttcttgcactttctcttcggctgtgttcctcatgctgtgaaatgtttaaactcagagcacttttgaaagctcctggctctacctggtgcttacagggtgagtgtatttgagaaagaatcccactttggggtcagcatttctttacaatgcgtgagagtcagaaatgggcttctgacctgcctctgaaaataatagttctcagtgcagtggacagctgttagttagagcccataacaacctgtgacaaacccatattattgaaactcaggtaagactggagtaagtacatccacacagacacttgaggcgggaagatggagctctggatgtcaaatatgaatttctcttctgaactgtcttatgactcacacacacacgtgcctggaagtccaaagtgtagttggtttttaaatgcttctgtcaggtaaccatggccttgggaaaaattatattatgttttcataactgcagtgaaatgcaaccacagagaggggaaatatgccaagtacaatcagtcattccttttattatactagtttttaaaggagaggaagtgctcatggctgcatttatatgaggcagattttttctaataatggtacaactattaacctaaaatataactacttattccttattaatttggcctatatgcatttattccaatgaagagttgaaagtaagcagttaaggtgaaaactatgtttttgaccatcctactaaatcttttaacattttgtccaggtctgagtgagagctgttgcattttctttctcatctgactcaccattcatggttatccaactcatttgagggatagggaaatactttctttctatttgtctgaatataccaatttgaatttgtcattttgatggctagtattcttataggaaacatatggagagatataagaaatcacataggaatctcattttcttggcaggagatcctgtgatattccttatagccagtattatctgaatccctctaaaatcttcatctttttactttttcttttggtatctgatgatcatagcccaagcctctactctgcatgtctgaacatggtcaatgtcttaaatgacctcctctccactcgtatttctgaagaaccatagggcttgtttacatgtcccacaagcctgtccctcctgtcacttgtcactttatgctatggatcactgctctgggccttcctgcttgttatctcttgctgcttgcagccatatcttcatgtcgcagaggttgttccatgaccactttatccctgtatggtcatcagcacccactcagttttccaaaggccctgtcaactctacacagtcatttatgacaaaccatttttcaatggctttaggaaaaacctgaaagaattacaattctgaaccagttaagtagaatgattttggcagcacattatagaaatcatgattcaaaaagttccaacagtaaggagtttaagggtaggatagttccacctttgagataatgaatggttacatcagttgcataaatgtcatactcaagaatataacatcttcccttctttctactcttcaatttccctgcattggcttctggctcaaggttagcacacttcatggtcacacaataactacagtagtatagccatcctatctagacccattaacagttggaaaagaatgattctcatttcttcttatgtgtctcttttgatggacaaggaactgtttcacagatgtctcctcagctagctgagcatgtgaatgaccggaattgtatcatcttcctattcctatcagtggcttaggccagttgggtcaagggtaagattagcttcccaagaagaagttgaacaaatgaaaaagggtagcttcctctcaaaattggagttacgttagtgaggtaagaagggggaacagaaagtaggtagacaaccagcagtgtctgatactaacacaggaaagtaaagcttaaagctggattttacatgttactactcttaccccttagtggcaggaggtgttctctactagtcattttgaccttcacctgtgttaccctgtagcaggggcttatctcccaccaaaggtatgagtcccctccacctcttctctcttgaagactgttttgtgccctaagttgactgacaatggaacattggtctcctttgagggaagtgccatccccatcccaactcccacagcagcaggggctggggaggggtgctgctcccacactccctccctgcccctgtcccagtggccccagaagccaaatacttctctataattccagattattctagtttaaataatgtagcttatcaaacaccaaaaatccatactagaagattttaagccacatgaaattcacattgccatttaggaaaaaataatcttttttaagatcatagctccctattcagatacctaattaatgaatatatatttatatatgttttttctgcatatatacatatatatatttgtggtaagatacacataacataaaatttactattttaaccattttcaggagtacagttcagtggcattaaatacaggcatatgaaactataattacatctaccaggtgtccccacctaatagacctatgtatatttgagtgatgattctttttgatttctgtgtctctatactggaataaagaatctctgaaatttgtaatctataaaattcttgaactaaaatcttttttttttcttttttttttctttttttatcaaacagacgagttgtttctcatcctgagggcatatgtgcttgggaaaaactctgacatcttaagaaatgatgttactcatggctgacgcatggctggcatatgaatccatatgaatatgatatatgaatccatgtcacaggccctccctctttccataatagaacacttccaaaatggcttcccatctcttgttaagccatcgttagctccctgataatattaacccatgaataatggcctctagaatacattttttattatgatgaaaggtaaaatttcctttgctaaaaactataaaattttcctttgctaaaattataaaaaaaaacttgtaagcaaagatatctagatgctcctgatatcacaaaaatataaatagttactctaaaacttccccctcactgcacaggagggattaacaaatcacaggacattttccctattccctgaacaaagattatagacccagagagagccctggtatcagacaagagtcttgaggacgccaggcaggatggcttcgcccacacttctctggccttcccaaatgatgatgaagaggtaagctggggcaatgtcttccctgggagatggaaacctagacattcaacagtgagtagtagtttaggggaaacagctggcacctctggcagtcgcctcagaggtcaaccagcgtgtagattgctttccctcaggctttggtgacagtgacaaaagaagcattcaaaatcataggctgagtgattgttccctggaagcaagtctgaggcccctgcagacgtggttgtcagtgttggatcaaagcactcttctcctctggacaggaaacaaagcagaaagaataaactggatgcacctcctatctccagaggtaactaaaaagatacacctgggaaggaccactctaataagggtttttgatgaaatggatcagagtcaaaaagggaagcacttgccgaaataggagatgcttctaaaaactcttgattttccctttggctttgcttttgaaaaatggaagctgtcttgtggggatttggagagtgattgaaggtgctgattagcagctgatgaactgaaagggagtgctagaaggaatggaattggagcccatagaagagcttgtggctctaaaggggaaaacagcaggaggcaaggtctgtctggttcttgctgcatccctagtgcctagcatggtgcccagcacaggccagggtaaaatcgttttcttctgactaactggcaaaaaaaaaaaaatgaaaaacacaaaacctaagcaagcagccggatgaagtctcctgacctccctcccttctttcccaagcccacggtcctaaccccataatatcgtacgtttcagtctgtgagggaataagcagggagcagcgggcatcttctagatccctggaccagcagcatcagcatcacctgggaacttggaaatgcaaattattgtgcctcaccctagacctactaaatctgcaactctgctgactggggctcagtaacctccaattcagcaagcactccagggaattctgaaacagtaaagcttgagaactaccatgctagtcgaaattatggatcaatttttaacttttttgaactttttaaccaggtgtcttggcatttcgtgaatacagcatgagccctttgcattaacacatggcacgaaattgttttttggccagagaagaagttggatcgatggacttgagagctttgaacttctttttgaggcatttggggttagaatgacgtagaaggggatctttggaacatgaaactttttgagaaaagctgtaaatatttttgtgattcttttttgagaggcgaggatagcttatgatcctcacatttccctgcagagcatttgggccagttttacttcccagtactgcatgtgctgaaagaagaagagagaagttgaatctttaaagaggagaccggttcaccagaaaaaaaaaagtgttgcttggaagctgaaggcttcatactaatttgttgctttcctcttcaatctgcatgagaacagagcaaggttgctgtctcgggagatttaagcagggaaccaatctagtttgtcttctaaactggaacacatgtgaaagtgaaaggggagtactattaataatttccctaggacagtgggtgtaaattgggcgccaccctagaccagtggttctcagttgggttctttttgactcttctcccccggggcacatttggcattgtctggaggcatgtgtgcttgtcccaacttgagtggggctgtgtgccactagcatcaagtaggtagaggccagggatgctgctcaacatgctgtaatacagaagacagcagctgcaataaagaattgtctggctcaaaatgtcaatagtgctaaggtcagaaacccttggctagaggacagatgggagagtaggtgaccagtgaaacaattagaatggggctgtgctgcagaagggcttgaatgctggaatgaaccatttatgttaattggccattcaaggctcatgagcagggaagtgttttgttagaagttggtttgtttcctgctgtctttaatacccagcacaatgtcaggcatatagtaaatgatcagtaaatacattgtccatctacccatccatccatccagaaaatattacctgaatagccaccatgtgcctggtagagtactgagatttgaatgtggaggtaagctttatgaaagtgattttggcatgggtttaaaggatgggttggaatggataattactggagatgaggaaacaagtgaggggcactgtaactatccagaggtaaaacagggagtgtttaagcaagtgccaactcaaagtgggtggaaaggaaggaaggaattgtgtcaaaaatatctctaacccagctatgtgatttgacccttgactcagttcaggctgtgaaggagatgaaggtgagcagggctgcttctagattttgagtctaggtaactgaaagactagtgttgtcaaaacaagatctcttttcatgggaaaattgatatgtcaactttgtaccttctgagcctgatgtgctggctgtacaagttggagcccccaacaaggagctagggatgtgggtctggagcccagggaagacaggttagtgggacccttgcccagaattcacttctgcatctaagctcaggctacacagcttatcatgtcatcatcactacagctataggataaagggttatctgctgagtccaaaatctgttgccttcttgagaaagatattgagaaacatccataactcttcagagttcttttttttaaaaactatatatccattcaaaatatgactctcactatgcaacctggtggaaaactctgcatttggccttgaaattcttctgttaataacagacattgttctcagaaaaggccattccctctggaatttcaaagattcaattatgcagtgaattttctcctttaccaaagccgttgtcttctactcctcacataaacatgagcacgtggcatgttttaaataagtactgctggctttgtctttgagtcaccaagaagaaaagccagtccccacatcagcctcatcgccctcctcatgaactcagtatgttgtgaattctgctttagggttgtttcttcctgtaattgcctgagcccagggcagcaccttttatctgctaatcatgaggtgatgttttagtactgtgactcccaaaatgaagcccaagatcctaacctccttctctattgctgttttcctttcccctgctgaggactccagtgacttgaggagacccccatgaaggaatgcctgcataaaatggttagggaaagtacatcaacggtggcttcagtgactactcccactcagccccatttctgtaattgattagtataatctggagagtttaatctgagatacatctaatctttggaaactttgtatcaccttggttttgcctgtaattcccatgcatttatcaccgctgtttagatgtgtattatctctgtaacacgtatcacaaattgactcttcttgtcttcagtgcgcaagagaaacagactttgcctccaaaatgtcagctagtttctgttctgggaggttacctcttttaaatgtggatacttgtgagaaacaactctatgtggagtgctaaaggatgtggaaaaggaaattaggctacctggattggaatctatccaagggtatccagtgtatctggtcttacccggcagacattgctaatctctcaaagactctttacccactgaacccagacacagcctccaagtagcttcctggctggctgtcattatcagttctttggagtgggcaaataaaatgaaactttggtgttattcctgctagcctgtaaaacttattatgtgagcttagccttgtcacccaaatactctaagccccattatcctcatctgaaaaatggggtggaggtggtggtctttgtatgtgtgcgtgtgtgggggggtgggtaaggatactatgttacaggattgtagtagggctacatttgttaacatataagagagcattttgaaaattgttgagattcttacaaatattagttattaatagcgcacacagcaaaattcaggttatctataagatcaaaacgtatttacaatattgatgctctctgatattgctctcactggcttcagaaatgtcattctggtggctgcagaggtgacttcctcagcagagtacacacttccttgccactataggcatagtatttgctaccctgtatcaaaaaattatggagtaggccattcaaaatgtcgctggaggatcagtgccagtcctgaagaaatgcaagttgtcagtcttggataagaaactttatagcaatttgaagtcaccatgacatccaagtatataattggtggccttatcctattgaacaaggagaagaccagttccaatgtgatcagacttgtgtggcaagtcacatgtggtatgaactatgtagtagtcatttacagtagggtcatgaatcagactgccgtaaatagaggttaaatacacacacacacacacacacacgcacacacacacacacacgccctttactatggatgatttgagaagtatcaatatagaggatgcaaatgtgcctatgtgtgtctgcttctagcaataacagggaaaatgtttggtttatcaaatagtacctagtgcttttgaaatctggaatcttctcatattagaggctgggctccctggttttgatttttgacacatgcatggtaccttaacaggaaagcaacaagagattagttatttgcaccttgcaggttcttccttccttattaatggggctctctgctttcacaaattctctcttctattaagacatctgagaaagcaatcaccactgccaaaaggagccagcccagtaggagtgggatggattagttcttgtccttatgagatacctttgttgttttctttactatgattttattttcttgactattaagactcgttaagactgaactgagtgaaacaaaacaaaaggaggctaaaaagagattaaaatatgagactacctgagcttttctatatacagggcaaactaggtctgttgatgaatttctttaagcttcagtttcctcacctgtgacatgggaatgggaatccttatattccgagtgaaaagtgagggtgacatgaggtcacacaagagtagtatttatcacagagccttggagagactcggtgcctgatgctcgcgatgcaggggtagagtatatagttaggagaaggcatttggtagtgaaatagaggtgggtttgattccaagatgtgtcacttctcagctgtatgaccttgagtaaattctttgaactctatctcagtttccccagctatacaatggagatgataataattgctggtatgaggattaatgataatatagctgatgccaagaatagtcagcactcaataagtagcagctaaaaattggaagctatgattataattaattttactgcagaagaagaattcaaataatctagatttgggtgaccataaagaagaaaactaagagtaaaatttccctggaattacagtgggcagctttcatctggtaactttaaattaaatggtattttaaaaatgggtatccttcgccggttgtggtggctcacacctgtaatcccagcactttgggaggccgaggtgggcagatcatgaggtcaggaggagcccatcctggctaacatgatgaaaccctgtctctactaaaaatacaaaaaaaaaaaaaattagctgggcgtggtggcgggcacctgtagtcccagctactagggaggctgaggcaggagaatggcgtgaacccgggaggcagagcttacagtatgccgagatcgctccactgcactccagcctgggcgacagagcgagactctgtctaaaaaaaaaaaaaaaaggatgttctttaaggaaagatggaataatgactagtacatgaaaatgcaggcattcggtatcaaatacaactcagtgaaggatggtttttttctataatgtgaagtctaaattgggaaatgtatcacctactgaaaaggtaatggttacagaatttgggcaggatagaaagcataatctttgagacccttatgtgtcctttattcttggctcatctggtagaaagagctaaactagttgagcttgttggttgagaaaaacctattacttctaatcacaaaatcggtctgttagaaaagaggagccgtagtttcatttcataataaacttatttgaaaggcagtggagtgttgttgtttctgtctgctagtataacttccaactctttctgataatagtgcttcattttcactaaataaccgttctcctacatttcatatgatttggggtggtttactggtcatagtatccccctttccaagccaacaggatgggaatgtaaccaggcttgcctaattaagctacactgtcccttggccacagcgattggcccaaggagtaagcatgtgatccaaacagagttgattagaatctttccctgggattttatatatgaacaataggaaagagaatttttcttcttctccttctccttcttcaatgtgggctcactgagcttgagtaattagacctacaaatggttaaaaccatctacttcctcctccagccaccaccaccaccccctgatgaacaggaagtcagcccaatacccagagaagcaaatcgatggagagggcatctaagcattttgaatttctgaatgccactgagttcaggaatagaacttgtatttaatgttggttggtattggaggcaagggtaatatttgtttgaggttctgtattgctgtcagagaaatgcactgtaaaccacgtggtactcaaggaacataaactgacttgtaacaaaacatgttgatagcaggatggtgtgattcaagacctcatatttgctttttatatcaagggatgcttgagctaattttcttttcagagtccattgataagtagcaatatcttgtattacacattccccattatcattttgacatacactgacagtcacatggagaaaacaattttttttttccgcgtggaaatggcacaatactaatcttattcctttgtcctgattatactgtgaacaggaaatggaacaacgtcaatctctctgctttgggatccataaaatgtgtttgtagagaggactggcattttggtgtactgcaatgcagagaaagaaggtacacttggtgactgcatttatgatttgagaaaatttcattttttaaagataatgaatttagctcttccgctagggccatgttcagtctttattctggcaaaacacaatgaaaggtttttttttttttttttttaaaaaaaaaaaaacatttccacagcagtagttcattcattaagcccaaaagaacattagctaagagtaaaacgttgggttttagcctcaagactgtcaccagctctgtgtataaccttggtccgtaactttttcatggactcagtctcttcaactataacaaggttattagagtactctgccttctgaccacaataggtttatcttatgacttgagatggggagtacataccctaaggtggaggtggggagatgattttgtcctctataatctagagtgaaactctcaaaagtctagggagtacataatatgtgatatttggtcctgaattttagagcagttttgaatcacaaaatagttttctgtggctaaggcataccaaaaagctgaagctaatggaactccccctggttctagataaaaggattaaggcaatcacacaagcagaaaaaggggaggatagtgagataaagtaatcacaaaataaagcaaaatgcataaatgcaagtgaagtcatcatttcagtgatagatttaggatcagaatgagaaaatccctcttctcatttctgagtgtatggacaatgagaaatcttaaaaggggagcaatttctgtcttgagatttcatttatgacttaattatgtgttctttggtaaattactttcactgtaatgctgattaagaatgaatgtggttattatgttttgatcttgcattgcttcagtaacttcttagaaatcatcctttttagattcaagtagaaagtgtgtccaaattttaacacaggaaggacaaactccataacaaagagaatgtcggtgatcttcataaactaccactaatgactcattctcttattaggttgagagtggttctgctgattattaagataattagagccatcagattttgccatacctcacgttgatggtataatttgtagtcttttaactaattagaggctacttttatggtgtggttgtaaaagagggtggagggtgatgcaatccctgttaatgaacttcacgaaccccttatttatcatagaaagcaaaacattagagattattctgtgaccacctttaagtgttgtatgagaataggtaatcaaagcacaaaaagaagccgagcagcggtgacataaaaccttcctaaattatcagccggatttggaagcaagaatgcgattgccggtgagagacagtggcaaacccgctggtctcagcccaaggatattgtgctgctctttgctaagtcagttggccagaagctatctacagaagtggcaattattctattctttctaagcactatctcctccctccccacataccacgtgttccaccctccccttctcaaattctggttagtgatttcaagtaatcctttagtcccatcagatttacttttagacatatcccagatccagataatttgcaccatcttcactgcaactctcttccaggtcctggaaggtaacagtcttcttgttgatcctccagcctatgttcttgtgcctggaatctactctctgtgtggaagaactccgcaaaacagattttgtcatgcccccgttgtcaaccttccattggcttccaaccactacacaatgacacccaaactccttgtttgagtctggaatgccccgaatgatctgccttcctcatcttttccatgcctctctttattcacccaatagcagttacattgccctttttctattcttggacacgttaagcttgtttctgccttaggctgtctgtactggccacttcctctgcgtggaatggttcttcctggatctcacatggcttgctgtttctgcttattcatgactcagctcagattccccaccaaaccccagccaggctttccctgtcctctctgcaagtggcccttactccaggtactctctatctcatcatcatgcttgctggtctctgtatcgtctatcactctctgaaatgtgctcatttattcaggggtttattgtctgtggctggtaaatatttgttgaattaatgagttactttaacaggagaaccatatttcatgtgccatctttcataaaactgtggtatataaaacagatgtagagggaactgctctggatgcagtgaggatggagaaggcactggatccactttgatgctctctctccccgttcctgcctctgccgaacctcaggctctcactccccactctgaatttgatgaatgcaatttgaacaccgtagccctagactgttggttgtggaggtgaaggagtggctgggtacatttccaccatcgcctgcctgaatccaaagcttggctggtaagccccactgtgaatcaagactttctctcttggttactcttctttgcagaggagccataaagtagattgcaaagggtaaaagcattctgttagtgagtgaatgggtcttaacaaaagatctgttcccttttatgtcctgcagaggctctgacctagaatcccatttggcacctcgttatatcccaggccctggctccaaggggaggtcgttatttcagcctgtaatctgacataaaggcttcccatttttcagctacataaagtaatataacacacatctcagcatcagacattaggattaacactgacaaggcttacgttaaaatgctctgctaggcagcatctctaaagtgaatagaatagctaacgtgcttgcacgatgaatgattcttcatggggagaaggatttatgtttaaatactattaacattttcactgtgacagccatggtttaaaagactggtatttaaatataagatttaatgtatttctataataatgctaatcccacagtattaattttttatgcttttaagtttgataacccaactcaccagtttagaaaatgtcatttcttccttggtttaatttttttctttttttaaatgaaattgaaattatacaattaagatgaagtacataatttgaaaataaggaaccatctatttgacctagagtggaggagtcagaaatgggcagtttcaatttaggctgaatgtggatcattaattagcagtgacagtagtagtaatacaactaattatgagcctgaagctctggccccctcaggagaggcagccttgatggtataggaactgctctggagattataggaaggtgaaagaattaggcctcccttctaaatgaacagcatgcaaaatgtttttttttttttctctctctctttcatataatttcagaagggccttttaggcagaaagggttaagtctgaatgccccctcttccttcttccacagaaaagcattgcttcttagaggcccacgttgtgtgcagagagagggtaatgcatgcatgagggtatgacatgaacaccagttcatgagaacaaagaaactgcaagtcgtgttaacctgcccagggccacaggatataggactgcgggttgtatactagatcagccagagtgggctagatatgctgcaggaatgaagagcgccaatatttaaacaatacaagtatatttctaacatgctatattaatctgttttcatgctgctgataaaaacatacccaagactgggaagaaaaagaggtttaattggacttacagttccacatggctggggagtcctcagaatcatggtggaaggcaaaaggcacttcttacatggtggcagcaagagaaaatcaggaagaaccaaaagcagaagcccctgataaacccatgagattttgtgagacttcttcactatcgaaagaatagcgtgggccagaccagcccccatgattcaattacctcccactgggtctctcccacagcatgtgggaattctggtagatacaattcaagttgagatttgggtggggacacagccaaaacatatcatatgccttttgtgggttagctaggtactgtgtatatgtctcttccttttaagaatataggccgatcactgtctgccatctgcgatcttgctggttgtcatggcagaaagaaacaaatatggtaaattgtgcacgaactcataaaggcttccacctagaatgggatcatatctgttttccttcattggccatggcaagccacatggccacatctaatttcaagggagcagggaagggcaaacttttcattcagcaggaagaagacaagctagaaatatttgttgatggctcttaaaactaccgcaggcaccttgccaatgggtgagcaggagctgaatttgagctgcaatgctttggttaagcaatgagctctggctcagagcttcatctgcctggaagaaggagcacctttttttatcctttataagaaggtacttcagaagaacagacccttagctatgtaatccattttgcctgctggatgacggtaataatcttaattcattcacttgttttcatattcagaagtattgagtgactccctactatgagctagacacagggagtagagctgtgaatgaataatcatgcatggtctctggcttcattgggtttatggtcactcagggaagacagataatgaaaaggaaataattacagatgtgatggatgctaatggaaggagatctgtaggatgctataggatcatatgacagcaaataagttatccgttgcaggcgttgtttcttcttatgcagcattgtgactttctccttcagggatacccaatggttttgaatgctttcagcagataattagaccaaaccaccaataatttagaggacttgttatttgggacatcagtgagcactggagtagtctaaggggtgatgtgcgtcacaaagcaggccctgaaacgtccctctgatgttcattaagactttatcgtagagtggctggggctgagagggagtgggtaactgcattggcatggagacaagcattgacccaggtttctaaatatctcaccttaaaagggccctgttgcagtgtactgcccgtattccttggataggactattcctcggataggactattcctctacacattgtcccctggcttccatctttaaatactattacattctggctgttgtctttttctagtcactggtgtctacttcgtgtttgtgcagtgcaaactagcctgaaagtgctaggaatttaatctcccagcccacatcctaccccgtcaccccttggtagcagttatcagaatgactcatggaagttggtgagtaagtacccaggctcctttgctcttgtggaggaataactgggaaacgtatctatagtgtttcccagtgaaacggagtccctcttgcccacagcaatcacatgtttaataacacacattttcttccctcccgatcttacttcctcactccactagtggtgatttctgcaattaccttctaaatcaactacttgccttcaaagtcttgtcttcagggtttgctttagaggaacccagcctaagaaaagtatatttaaatacccagccaataatccccagaatggggacctgtgaaacattctctgtgtctgctcttctacaaacgggatgctaagaaaaaaggtgccatttgacatagataacacagagaaatagcaagtgagtcttgctggatggtcattggtcttagctggctgattgctgttatgattgttgatatggtttggctgtgttcccacccaaatctcatctcaaattgtagctcccataatccccatgtgtcgtgggagggacctggtgggaatcatgggagcgggtttttcccgtgctgttcttgtgatagtgagtaagtctcacaagatctgatggttttataaagggcagctcccctgcgcatggcctcttgcctgccaccatgtaagatgtgcctttgcttctcctttgcctttcaccatgattgtgaggtctcccccaccatgtggggctgtgagtccattaaacctctttttctttataaattacccagctatgggtatttcttcatagcagtgtaaaaatgaactagtacagttttgctttcaaaaatactggcagggtacactgtagcatcagttacaggtttttttttttcccaaaggcatcttgtgataatttggcattttttgtttatattcatcatccaactagtaccaattacatcacataatcctttggggaaaaaacacacactttaacacaaagcaaaggccatagaaaatatatttgactatttttttttccttctgaataccatgtttcatgttcttctagttcataatttcttcctcagctgtattgtttactatttaactttttggcataaaaatatattgatgagagaaagaaattaaggtctaatttatgaaaatagacttcttgtacttcaggaaattcatgtggcgctatttggaaaaggtgatgaatgtgattttcagtagagtatctgcataaattatgattgatttgcaattcatcaccttcctttattgttcctcctcagtgcagagaccttatctgtgcattatcaaggagggaatatttttagttagtgattatttggcagaagtgctaataatgatggggaaatttttaagaaaatatttccaaactgggagtttctgcattttcaaaaatagcaccctggaagtttgcactgagcccttccatctttcaggtgttgccttccttaaatgatgtctgaaaataaatgtttctgtgtgagtttggccccaatgggtttggccttgagcttcagagaatgacattagggcacagaagtattgccagtgctgcctattccacagcctcccaatcagtataactgacgtctcaatcttcctcaccctcatcatctttgtacatggtgttggtgtccatgtttgccatggaatgggtcatcttgtgttttagctgtctttgaaatagattgcacttaccctatataccaccacccatgcttcctcatctctatgtgcttgtgcttgcttccccttcagccaagagtccattcttctcatcctgccagccagtcaagctctgtttcaagtttctgctcagtgccacgtcctccacagagctttgtccatcagactcccctctttcttcctcttctcttcagacccaggcacaaggcagcccactatagtaggaaaaaaagagatctttcgggttctatggacctgggctctgccatttactagctgggggatcatggatcattactggattttcataccgtgctatttcaatgtataattcccaccttctggttcagagaaggagcttggggaatgtaaatattctttttccttctattttctgaagtttcctcacaccttatctgacactctctggtggctcctttttattctgttctaccctgtattagaactatttatgtagatgttttatctcacttttcataataaacacaaacatactgatacacactgactgccctgtgctcaccaagcacctgttctccagtcagtctcatacttttcattaaatcaaacaaacaaggtaaacaaataaatacctgtgtcttaagggtgttgatgaagggtgtggatgttatgggtggtgatttggaataacagaagaattatattacacctaacacttcaaaatttattcaacttttctccaacatccttcttttccctacaagttccattccctatggcaactgtttgcttgtttgcaagtactctctctcaatatctagcaatcagtttttctccttgcatacctggtcacccttctctccttctttataccgaatcttctttttctttttgtaagtcagctagctgtcctttggccattctcatttgcattcctgatcatcaattcttcccaacaaagggtcttctcagaaaacaaagaaggattctaatcatgtataacataattttcccattaaacttatgctattttcttcttctcagagctcagcacttttagtattttttttaattctgaagctgtttcaaaccgacagaagggtagcaagaactgcggtatcctttcaccctgattatccaccttgcaacattttaattctctttcattcagagagatcaatatatagatattccctttcagatatgatgctccatcactcttcaggtgtttgattaccttcccaaaacaagagcactcttctcattactattataaaaacacttccaatcaggaatcaacactgatacagcactaccattcagtccacaggccccattcacattttgccaactgtctcagtgatgacattttcttttttggtccaggatgctatacagaaacatacactgcatttaattattatttttcatcagtttcctccaatctggaatggttttgtttgtttgtttgtttgttgagagtcagagtctccctctgtcgcccaggctggagtgcagtgacgcgatcttcagctcactgcaacctccgcctcccagcttctaagcaattctcctgcctcagcctctggagtagctgggattacaggcacacacctccatgcctggctaattttttgtatttttagtagagacggagtttcaccatgttggccaggctgggcttgaactcctaacctcaggtgatccacccgcctcagcctcccaaagtgctgggattacaggcgtgagccacagcacccagcctggaatggatttttattctttccctgtctcgtgttttcctgccttaaagagtataggtctttttttcctgtaggatgactctttctctggagcttccactgtttcttcattattagactcaagtcatgtattcttccatgccatcttggcaggaattccacaaaaacgctgctgagctcttctcagcatatcacatcagaaggcaaccacactgaccgtatccccacttgatcacctggtccagttggtacttgccagatctccccatcattctttgagcatttctttatattctggtacaaaaaagatgctccaggatcatcttatactgtccctgtccagccttggaatcagccacttctccaagcagctctggttcctgtccgtgtagaatgattttagaaatcaagatctgggtgcttagcatgcttattgttcctgtgatgtcaatgctttgagacccagtcaacacagagctaggaaatatgtacatataagtccacacaaacacacacttattattatttccatatctgggtatgtgtatatgtttacacataagccacatgaattcatatcagtatcttcaattcaaatctaagtcttttcccccttccacatttataaataccttctctgacagaaacttggttcccattatccttaatatatatactcatttgttcaatattagccttcactgcccaccacctgcgtacatctcatcctctgctctgcttcctcacacactagaaacaccactgcccccatccatgcagcacccctctccccacgttgccctgcatgttcagttacagagcaggctgccatcactacccacctccacaagacacccctcgctcctgcctcctcagatgctatcatttctctccaagaaagaaagggaaaaggctgggcacgatggctcacacctgtaatcccagcactttgggaggccgaggcaggtgaatcacaaggtcaggagtttgagaccatcgtggccaacatggtgaaaccccgtctatactaaaaatacaaaaaattagccaggcgtagtggcgggcgcctgtaatcccagctacttgggaggctgaggcaagagaatcactggaacccaggaggtggaggttggagtgagccgagatcgctccactgcactccagcactccatctcaaaaaaaaaaaaaaaaaaaaaaaaagaaggtgggaaaaggaaggaagatcaccatttatgtctttttgctgatagatgatgtgggaaactcccatacacctttcacagcagtcacacatatgttgaatgggcaaaccattctttgacatctactcactcccttttactctctctgcattacttacttgtctccaaggctgtgtctaagcatagttgaagacagaaatcatttaataatattcagctgagccaactggccataaagctgagactccaattaggggaactggaagctctgggcagtggtgtcaggggaccagcaggtggcgcccgtaagttctactctaaacctttctgtatccaggcttgttcactaccttctttcaccacctggtttctctctatcagagctctttaaaaatatgttagcattcacagttcccagtatcgctgcagacataaatgttgagaaatgcattcttgttttccttcccaaggcaccaatagtacaaagacaagcataaagccccttaggatacaaaaaaaaaaaaaaaaacccagcactttgcacagcatagtcataagtgacgtcactctgtaatctttaacaggagtggtgttttccacgctcataggacaaactgactcttgaatctttgttaggcctccctgtctaatcgatatgtaagtttctctagggaaagaatagggtggaatattatttgtataatcttgtcctatgaaaatatgaaagagattattggcaacatttttgataacctggtggaataaaactccaagccctgcctaaggtaaattatcataaatcttctatgtcaggaacgtggtagagagttgcaggtaggcagtgaagtggccagaatgtttaaaaaaaaaaatattctgacctggaatctgtggcagagtggagagagttgcggtgacatatctgatctcattagtgcttaaggttcctcacgcagagatggagaaatgacagtgtatcgctcattcctgccctctgaagcctttccattagaaatgctgcaatttaatctcacatgtcacaaatcaaaccccaacttgaaaactgcttcccctgaaaaggtgaacacattccatgccttgtggaaggaactccagtgcccctcagaggaagtgctgtgtccccgatagcagctggtaatatcagctccacatttgaaaggaccccaggcatcagtattcagagactgcgattgttacattagcgtgactttttgcaacttatgtgactttgggtgagttgttgaaattccacttgactcagtttctttattcactaattgagcataatctccaccattcagggtggttgtggggattaaaggagagttaaaaaaaaaaaaaatactcagccggggagctaagtacttgataaatagaagctgtaacttattattgcttactgttacttccagactctgagctaagggctttatattgtttacttccttaattcccacagaattagatagatattataaaaagccattttgcaaagaaggaaactgagtcttagagaaattagataacattgctacattatacagctagaaaaatggtacattccaaagctaatgaaatctttctgtaatgttacactgctacttgtatattggaaataaaatttgttatgccttacaattgagtatactactaagaagaatggtctgcatctatattcctttgtgagagaaggctgtaattttcctcccttgtgatttttatgcctggtcctagtaacagggttatactgatttacagaatctatggggaataatctctttttttctatcatatggaagagtttgcataaaattggaatgatgtcttccttgaacattgggaaaaatttgcgtgtaaaatcacctggtgtgatgttttctttgcaaaaaaaattttaacaattaccttaatttatttaatagccatagggctatataaactttttgttatttcttgggtccattatggttagttataaatttttaggcatttatacatttcatctaaatttttaaaaattttgacagatagttgttgacaatagccatttattattttagttgtaataaatattcactttttcattcaaaacatcttcctcttttaatcgatattgtcaaaggtttatctattggctgggcgtggtggctcacacctgtaatcccagcactttgggaggccgaggcgggtggatcacgaagtcaggagatcaagaccatcttggctaacacagtgaaaccacgtctctactaaaaatacaaaaaaattagccgggcgtggtggcgggcgcctgtagtcccagctacttgggaggctgaggcaggaaaatggcatgaacccgggaggcagagcttgcagtgagccaagttagtgccactgcactccagactgagcgacagggcaagactccgtctcaaaaaaaaaaaacaaaaaaaggtttatctattaattattttatcaaagaatctacttttgacttttttgatcttttctagaaaatatttttctatttcatcaatttgtgctcatatttattgtggtttttcttttgctaaatatgaacttattttgttcagtttttgtatacttaagattgacaccttattaacattgaggctatcttctattataagtacagattttaatatgtagcatttcattattattcagttgtaggtaacttttaatttcttcatagtaaaatatcaagtgggggaaaataagtttgtgaggatagcataagattaaataaggatggaatcctttttataaaatttaaaacagcttagattataaagcatgttaggaccaattatacatgcaataaaaccctgtaagaagaaagatgaacctggcactcaggaacataatgaccttggagacaagaagataaatgggggaggacaacatggatagatgggggtcattatgagggtcaaagctgttggtttatatgtggcattcatgggtgtttattccatttaacagaataacttaccaagtaatatcaggaaaatttttataattaacattgggcaaattcttactatgtaccagcccattttaatactcactgtatcctcaaaagaaccctgcgaggggaaaacattgtttaatgttacagttatgatagatccaagtactgagtgcaattagtattgaatcaaactgcttcagaggccacaattgtgatcactggatatgagttttggaaaggcaaaccaaagtctttttagtaatcaggtctgtagttatgtgaggtagagagcttcctgtcagtggaaggattccaacagagcccattttctccttccagggatgtgccgttggataaagagacttagctgcatgagcttcttagcctcctattaataccaaaggcctcagggcagtctggctcctctctctctgctcacttaatgagaaagttatttagagagggagcctagtatggcaataatatgggctctagagtttcctggacctcggttcaaatcccagatctaccaattaccagctttgtgcctgtgaaaaacaattctattccccagacctcagttttttcatctgtaaaaatcacaaaattgtgaggattaaataaaataagctctggattctgccctgcactgtgcttggactagagagtgctctgcggtgtgagagagagggaaatgagatttgctaaatatgtgatgccagcacctggattccctaagacaatgagttctgacacttcacgaggtagaataatgacctaagtgatgattgggatgctcattggaaagtcagatgggaaacttgacctctttgccttcctgtccctgtttttttgcacatgcgacgtaagcacaataccgagcttcaattatttatcagacgtatttgtgttcagtgacacgtgtggcagatataaatctgtgggttcttccccctggaatgcttccgggcgagttatacagcagggaccctttaaagcatcagcgttgaagagcagagattgatttccttcccagcctttttctttcatgcaccttaggcttctggggatttccttgcagtgcagggctaacgacttttgataccaatcaatgcaaagctaattaatttacttcacaattttcatgtactcgaagtacccaatggttcaaatgatttgttgttgttttttgtttgtttttgttttttttagaagtctgttctttgtcttatttttattttttacacgtggactaattagctcctgatgactttatctattggtgggattctaattgtagcaggagtgtggattgcaacgaaggagcactgagattccatgacttccatgctttttaactgctaagtcttcatgacaggaactctagactctcaataagtataattttattttgatagtttatggaaattagctagctaattttaactgtctctgggaagttccaacatggcatgagatggaaagtgtctatgtgtgtgtccccatatctctgtgtctgcatatgtgtctgtcacacacacacatgcacacccacaatagaatatgatgaaaataaaaatttgtggaaattattctcaatctggaaactataaattcttcacttcttaatttaaaacatcatcctttcatggtgatattaaagaattagttcatttagataagcttccagtttcatattttgaagtatttagtggatattttattgagtgaagattacacttagttttcatgttggtataatttaaatatattattcataggacttgcaaatcacataatacaactgagaaaacaagatgtacctcaatgatagaaagtataggctatgaaattcaccaaacttgagtttgaatcttggctctagcttataatggccagtttgaaatatctacattctttgagtttcagcttcttgaactgtaaaatgaagatcataatagcctatgtggatatttcaaaaatgagtgttcaaacagtgagataccaccacacacttattagaagagcccaaatcagaacactgacaatgccaaatgctagagaggatgtgaagcaacaggaactctcattcatttctgttgggaatgcaacatattacagcctctttggaatacagtttggcgatttcttacaaaactacatgctcttacaacatgatccagcagttgtattccttgatatttactcaaaggagttgaaaacatagccacacaaaaatctacacatgaatgttcatagcagtcttatccttaattgccaaaacatggaagccaccaagaaattcttcagtgggtgaatggataaatacactgtggtacatcccaacaagggtttctgattcagtgccaaaaacaaattagctatcaatccatgaagagacatggcggaaacttaaatgtatattactaagtgaaagaagcctacctaaagaggctgcatgctccatgattctgactatatggaattctggaaaaggcaaaattatggagataataaaaagatcagtggttgccaaggattaggagggagggagggatgaataggcggatcacagaggatcttttaggacaatgaaactactctatatgatactgtaatggtggatacatgccattatacatttacccaaacccatagaatgtacaacaccaagactgaatcctcttgtaaactatggactttgggtgatatgtccttgtaggttcacaaattgtaacaaatgtaccagtctggtggggggaagttaatatgggaggcaacatatgtggggcaggggatatgtgggctatctccgtaccttactatcagttttgctgtaaacctaaaacttctctaaatataaagtctttactgttttaaaatgagtattcatgtaaaaggtgtggcgcatttcttggtatatagtatgtgtgatataaacaccacccgcttgtcgatgggggtaatattactgtttggtaattcgttctcttgctctactctctacccgaagaacaaagcaccacccaagagtttaaaaattaaagagcttacactgaaggcctccagctagtttacctaaggagatggaatgtggctgggtggagagccatatgctggagaacagaactccaccataccttgaatgattatatgtgattttcagaactactcaatgtaacagtttaattaaaatatccaggaagaactaatatcccccgactgggtgaatcttatctctactaaactgagactcaaggaatgtgttttagagcaagatgaaagtgtaaattagaatcagttctacaggtatgtgtgactactctttttctcttaattgggaccttcttactagtttgttttaaaaagactgcaaagtcgtgtctgattttcatgttgtcagaagcttgtaggagctttaatcttgcagtttaaaaataacacctccaagaagaaactaacataataatgcatgtagcatcactggggatcaaggtaaattctagtgggaatggcaacttgtgatagtgatattctgtagttttgggcaagaccctcttgtctcttgagaacacgaatgaatgtaataagcctgactgaggggtgaaatgagctttgcaacaatgactaagaacaaagctaagtattacataggttgggtgtgtatcaagtgataattgaatgggcttggagttggctaaacctgggtttgaagctcaagtctaccactccattagctgtttaacttaagacaagttacttagtttttcacactttgccttcttctctgttaaattgagataaacataggtcccttgcatgggagttgtaaggatcaagtacaataatggatatgaaatacttagcataggtctggcacataagaaatgctctgcatatttctaatcttaacattttctattaaatattacattttacctgacatttaaccagtagctaatgagccataaaagttctagttagttaataattaatgagctctgatcgtttttgagctatgaggattaccaccactctactaccaccatcttcatcaactttagattcctcatatgagaccatcagctgactgtctggaactcagccagattgaccttgttagaagatccaggaggagccattgagtcctggatcagaatatcacagcttcatcatcagtgtccaaatccaaaatagagaagaccctgctcttttcattgatttttgtttaccaaccccttgtgaacaatgaaactggaagactattagaagtagaaagtattggccataatccaggttattccctcgaaggggagctttggtgacatcagaatggattagaacatacaatcaggcttttaggatgccaggatcaccacctctacctccccttgcacagtagtattctttttgttgccttaccaacacatttacaaatgcagaaagactcttgcttttgtggcaagtcacacccacaaggtgccttttctcagacatgtgtgagtccttcagtcattgttcccagtgtcagtgttgagtgcaggagctgagaagagaggtgactcatttttaattgatatcttaaataaagttccttggggtggccatgtattctgtccctaacctctctggttagagagcctgagcttgtatcggctcattaactctaatagcttgacctttagcttctcttctgtgtgtgatgtaccagccttcacttctcctgcgtaatttaagtgcagggatataccacattttttattggagggcttaggtttttcagggttaccctgagtctgagtttcattttaatgaggcagtgccagaaaacaacaaggattccattacctctaagagatatacccaaagctttgggcccaacatagtacttatgcagctgcaaattaggaattaaagtagatgttggtaaagaggtaaagttgtctgttcaaaaagttgctagggaatattgcaaattaaaacatttgtccactgataatgaaagttgacagtttcttcctgcttagattttaaatccagcatctttactttttgcaatttatgtggaaataatgaatgttttgtgttaagaccttctccctctagggaacagggcttcacctttctaatttttattaaattaactaccagcatgcagggaatttcatgttagcatttggtcctagcagatcatttcaaaacacattggaaaaaatatacctaattaaaattgtatggaaaaaaacccagcatgacttacttttaggctgttagtgcatatagttgtgtatctataatttattttaaagaactaaagtcaaaggtattatagcttctgcagctgaacatataccttataatatttctgattttgtcaaaaattaaattatgctttttccttcactgcagaaacaatgcatatctccttctataagctactcttataatatacctgattaagaataacccatatttatttctgaaaacattacaagtcttacttttagagagcaaagaagttttagatagttcgtcattaattggtaaacaactagctccttcctcctaaacatgtctcttgtttcatctcttccatacagtccctcaggtacgtgctgttggaaagtttaggaaacgaattcctagcatccagatttcatctgtgtctgtttatatttgtgggttggaggctgtatatatttgtgggttggaggcctagggtagtttgcaagccaccaatcggattgaagtcttgataattttgcctccatgagattgtggtttggacacaactcatatcgcatgcattatttgatctttttcatatgcatttaataatgggagaatctcatcttttttttttctgtgacagagtctcattctgtcacccaggctggagcgcagtagcatgatctcagctcactgcaacctccacctgccaggctcaagtgattctcatgcctcagcctcctgagtagctgggattacagacgtgcaccacaacacctgtctaatttttgtatttttaatggagccatggggtttcaccatgttggccaggctggtctcaaactcctggcctcaagtgatctgcctgccttggcctcccaaagtgctgagattacaggcatgagccactgagcctggccgagaatcttatttcttaacaaacaactatatacattagcttgattgcctataaagggatatgaacctgacctcatatatgagagtactgtcctaaatggaatttgcatgatgacaggatttattctgttttaggatcatgtgatatttgaataaacagaaatataaaaacaaagaatgacagatgcagctgaatactcaagagtgaaggatgagagacagggactctgaaatgagatctttttccccaagtgttttattgttactgggcattgaaggaagaatctgataatgctattctggtagagctttacaatggcatttatatgacaccatatttggaaaggttcctcagacaatctaagtgccagcaagttgaatggcattattactggataataacaaggctggaaaacttagaatagcttaccttcccattgcgttacctaatttatctaatatatcctaaatgtaagtactttgggaatttcagaagaaaaagtattgaatgtcaacacaaataatcttttttgtctttataatttctaagatctctattattttagaagatattctaaatattattttagaagattactgaaattgctcaaaaatccccaaagagctattaaaggtctgtgatttttttaaatctttttggcattctttccctataaatataggtatattaaaatataattgatgggaagattatagagtatgaagcttgagaaatctgtatttccacatagataacaattgcattggcagaatctgtctgttgtagctattttggaactctggagtccactgaaggcctgaatattccagggaaaggggcacaaattgtgattaatttcaatcaatttcagttcttagcacagtaataactacccattccccatctttcagccccatggcaggcagctgtgcatgtactcctggtttgcacatggcttgtgggagccacggtgggcaaaaaggactctatcctgcaaatattgggatctgtattctgattactgattgccgttttcaatcacagaggtacaaaaaagaggtggtagccattattgttgtaccttcctctctagctgaagtgactcctagggaatttaaagggctgatgccttttttcgcttcccttaatttttcttctttccctttttgggacccagatattgaaaactaggacattcaaaagcaactacatatgtgggagactttagatagctactgtgcatgttccaggcaaggcactggctcagaaaagactttaagtttatacctcagagtgatccttgctatagagttggcctacaacaatcaaaaacatgaaaacaaaaaccagcaaccctagcaaagggggagaatctgatttcaagaattatcatattattcgattcatatgtccagttttcaacaaaaataaaattacaaggcatatagagcaacaggaacgtattaagcattaaagggaaaataaataaataaaccaatggacactgagctgaaaagacctaatgatggatccattagccagatacttaaactacctatcatagagatgatcaaaaaaactaaaggaataattggggaaagtcaagaaaataatgtctgatcaaaagggcaacatcaataaagagagagtgatgcaaagaaaccaaaaataaattgtaaagctgaaaaatataatgactgacatgagaaattcactagaactcaaaggcagattttgacaggcagaagaaagaattaatgaatttaaagataggtcaatgaaaattaagtctgaggaacagagagaaaaaaaaagttgaagaaagatgaacagagcctaagggacctgtggtacaccatcaagtgaaccaacgtatgcattgtgagagccccagaaggaaaagagggagacagaaaggggcagagagattatttgaagaaataatgaataaaaacttcccaaatttgttgaatgacatgaatatgaacatcaaaaagctcaccaaaatacaaatagggtgagcctgaaagactcacaccaaaacacattataaatactactattgaaagtcagagacaaagagagaattttgaaagcagcagaagagaagagatttgtcatgcactagggatcctcactaagattatcagcagattttttcattagaagctttacaggccagaaggctcagatattcaaagtggtaaaagaaaaaaaactctcagccaataatcacgtatccaacaaaactgtactgcaaaagaagtaaaggagtgaaggagaaattaagacattcccagataaaacctgagaaaatttattagaactagatctgcccttcaagaaatgctaaagggagtccagaaggttaaaatgaggtgatgctagacagtaacttgaagctatataaagaaataaaggtctttgtattggtaaatatatttgtaagtagaaaagctagtgttattttaacatggtatgtaattccactttttgtttctatatgaattaagagaataacggatttttaaaatatattggtctaaaaatcaatattattataactttggtttataactccatgttttgttttctatataatttaagagactaatggataaaaattattagttgatgttttgaggaagtcaagatatatagatgtaattttatgacatcaacaacagaaaggggagggtataatgttgttaaagtagcacagtttttatatgttatagaagttaagctggcataaattcaaattacagtgtaataacttcaggatgttaaatataatttccatggtaaccacaaagacaacagctaaagaatatacagaaaaaatcgaaaaggaatttaatcatttcattatcaaaacaagaaatcaaccaaacacaaaagaagacaggaatacaggaaatgagggacaaaataaacctataaggcatatagaaaacaagtcacaaaatgacagaatcaaacctctccttaacagtaattactttaaatgtaaatggattaaacagcctagtcaatagacagaggttgacaaaatggttttaaaaaatcataatccaactatatactgtcttcacagacttactttagaaccagtgatgcaaataggttaaaagtaaaaggacagaaaaggatattccatgtaaatagtaaaccaaaacagagcagagttggctatactaatatcagaaaaaatagactttaaataaaaaatgctagcaaagagacaaaagacagaagttaagtaagaaaacagaggacttgaacaaaacagtaaaccagctggatctaacagatacatgccaaacactctacctaacaacagcatacacattcttctcaagtacacgtgagacattttccaggatagaccatatgcaaggccacaaatgaagtctcagtaaattttaaaagacagacattgtacagagtgtcttctctgatcacaataggatggcattagaaatcagtaacagaaggaaaactgaaaaattcaaaaatttgtgaaaattgaataacacaatcttaagcaacaactggattaaataagaaaacacaaggggaattagataatacttaaaagacaaatgaaaacaaaaacacaacatatccaaacatatggaagtaatgaaaacagtactaaggggaaattttatagctacaaatacttatatttaaaaataagacaaatgtctaagcttacaacttagaaactagaaaaataacgcactaaccccaaagctaacagaaggaaagaataaagattagagcaaagataaatgagatggagaacagaaaaataatagaaatcaaggaaaaactagaaaatcaggggaaaaagtgatttttgaaattatcaacaaaattgacaaaattttagctagactaagaaaaaaaaccagaagtctaaaattaataaaatcagaaatgaaagtgaggacattgctatcaagtctacagaaataaaatggattataagcaagtaatataaacaattgcatgccagcacattggatagttcaggtgaaatggacaaattcctagaaacacaaaacctatgagactaagtcatgaacactgaatagacctaaaactagtaaggagattaaatcagtgatcagtaatctcctagcaaagggaagccccagaccttatgactttgctggtgaatagtaccaaatatttaaacaactaaaccgatctttttcaaacttttcaaaaaaattaaataaaagggaacacttcctcattctatgaagccagcattaccttgatacaaagacattgcaaaaaaactacagaccaatatcccttataaacattgctacaaaaatcttcaacgaaatactagcaaaccaaactcaccggtatattaaaagaattatacatcatgaccaagcgagatttattcttggagtgtatggatggttctatacacaaaaatcaaccaatacaatacatcacagcagagcaagaagaggaagaaacacattatcatctcagttgatgcagaaagagcatctgccacatttcaagccctttgtggtttaaacacacacacacagacacacacagacacacacactcaacaaactaggaaaagtaagaaactaccccaacatgataagagccacatataaaaaacccacattgaacatcatgttcagtgacgaaagactgaaagatttgcctctatgatcaagaacaaggaaagtatgcccattttcaccacttgtattcaacatagtacttaaagtcctagccagaaaaattcaaccagaaaaataaaggcatccaaattgaaaatgaagaaattaaattatatctgtttgcagattgtattaggctattcttccattgctataaaagaatacctgagacagagtaatttataaagaaatgaggtttaattggttcacagttctgaaagtcacacaagcatggtgccaatatctgtttggcttctggggaggtgtcagagagcttttactcatggcagacagtgaagcatgagcaggcatgtcacatggccagagcggaagcaaaagagaaggagggtgtgggaggttccacacacttttaaacaaacagatctcatgagaacacactcattatcatgaggacagcaccaagccattagagttctgcttccatgacccagtcacctcccactaggactcatctccaacattggggattgcatttcaacatcagatttgaaggggacaacatacaaactgtattacagatgatatgaacttacatgtagaaaaccctaaagattccaccaaaaaaaaaaatctgtaaggagtaataaatgaattcaacaaagcaataagacacaaagtcaacaaacaaaaatacattgcatttttatccactaacaacaatctgaaaagaaaattgagaattaaaaagaataaaatacttaggaattagcttaaccaaagaagtgaaaaacttgtacagtgaaaactgtaaaacatttctgaaagaaggtatcaatcaatgaaaacacatcttatgtttatggattagaagatttaatattgttttcaatactatacaaagcgatctatagacttaacacaatccctgtgacaattccaacgatgctttttttgctgacatacaaaaagccatcctgaaattcatatgtaattgaaaggaccctagatggccaaagaaatcctggaaaagaacaaacctggaggactcatactttatgattacaaaacttactgtaaactgtaggagtcaaagcaatgtggtattggcataaagatagatttatacatcaatggaatagaatagaggatagaggagtccaaaagtaaaccttcacatatgtggtcaaatgatttttgacaagagtgccaagatgattaaatggaggaaaagacagtctttccaataaatgccgctaggaaaactctgtatccaagtgcaaaagaatacaattaatgttaggtacattccttaccttacaccatataaaaatttaaaatgagtctccgacctaactttaagaactaaaactataaaactcttagaataaaatttagagcaaaagcctcatgatattttatttggcaattatttatcggatatgacaccagagacacgggcatcaaaaggaaaaatagatgaattggacttaaatgaaaaacatttttgtacatcaaaagacaccatcagtatagtaaaaaggcaacccacagagtgagaaaaaatatttgcaaatcatatatctgataatagattaatattcataatatatagataattcctaaaactcagcaacaacaacaaaaatcactaattcaaaaatgcgcaaaggactagaatagacacttctccagagaagatgtacaagtgtccaataaacagttgaaaagatgctcagcatcactaatcactagagaaatgcaaatgaaattacaatgagatatcactgcatacccattaagttggctgctatcaaaaaagagtgaagtgttggcaaagatatggagaaattggaactcatgtgcactgttggtgggagtgtaaaatggtacagctgctgtggaaaacagtgtggcagtttctcacaaaattaaaaacaggattaccatatgatccagcaatcccacttctgggcatacacctgaaataattgaaagcaggaactggaacagatgtttgtacgcccatgttcacccacattcatagcaccattattcataatagccaagaagtagaagcaactcagtatccattgaaacatgattgaataaatcaaatgtgttatatacatgcaataaaatattattcaaccttgaaaaaggggaaatcctgataagtgctatgatatggatgaatctggaggacattgtgctaagtgcaataagccagtcactaaaagacaaatactgtatgattccacttacatgagttatctagatttgtcaaccctcatggacagaaagtagaatggtagttgccagaagctggggggagggagaatggggagttgttatttaatgggtatagaatttcagttttacaagacgaaaaagagttctgcacatggatggtggcaattgtagcccacaatgtaaatgtacttattgtcactggactgtacacctaaaaatagccaagatagtaaattttagattatgtgtattctaccacaataaaagaaattggaagaaaatatcagtggtaatccttcccaactctatagatacccctgaccctgctaatcccataggtctcaatgcacgattggttttctttataatcaaacttggctggtttctgtttattaaaaagatagttttaaaggattgtctgggtttcaggagtgtgtgtgtgcatcagtacacccgtgtgttatgggttgggttcttgggctgcagtactgagatggactctggagtacaagatgtttattaggcatcaacacctgtgaaaggaaggggcagaaacaggagtgggcaaggtagaagctggactttgaggtaggccctccaaagcttcacccaagccagtggggagccctgggttcattattgcctatctggattgttccgtgatgaatggaaacagcagcatcttgtcacacctgcctcactctgtaggaaatgaaagctgcccaagaaatgtatggtctttagggaagcagctcactggagctgaggcccattctcaagtagctaatggctgaacagtgcttgctaatcactatccaccttacagttgggaggccaagtccctccttgaagggcaacctgggtggtacatatctgtgcctaccacaatatgggtgtagacttcagccccaccccacacacatacctagatctagtttagcatacagctgtgatcttccagaatgacaggtaacccaggcaagatcatctgaccttttcatttatatcattttctaccatcaaaggggctatggactctgccaagaatgtagcaagccaacttgaccttcagaggtaaaaatgaaacccgaagacatggagaaaattaaaccaactctttagcaaaatctagagatgaagtgagggcaccattggttcctgggtgttttaatagaatgtggaaatgtgaagcagcttccaaatgacatttattaagctcctagtgtatttgctaaatgatgtacaccctgctatgtcatttaaacctcacaacaaccctatgagcccagggctgttattatcatcaccattatatagatgagaaaactgaggtgcccaaggtcccagagctgtcaagcactgaggcagggatataaacctaagtagtctagtcctgcacagttttaactattccctgaggacctgaccatttttctgaacatatgtactggggacgttgagtgatgtaaccacgcaaaagactgcagcataggtgtctgcattttgaggattgaggcaaggcttctacacacaaaattataaatgtaataaacatacagcattgtccattcctgcgtgcttgcttatgaattggcgatggatttcagaaggagaagaaatctcctacagaagggactggtgtcagctgtgcctttacaatgggttaaagataatttgaattcattgccaacattcaaaaatgaagagattcctcattgaaattttgatagatggtttctttctttttttttttttttttaaagggggataatctggtgacatgatgcaccttcctgtgagctggcaatatgctgaaggaagtgggtttgccatccttatcaaagggcccctataggtgtctgagttggtaacctcagtggggccacaaaaataagacattatcttataattacacagttgcattttggctctctgaatgggaatgatggggaatctgcaagaatgggggagtacttctgttcaagtgagatgtcaagatttcaccttgcccatcctttttgattacctgtagtcagagggaaacatagcccacagagtgacagctctaccctcttctgactcctcctgtggcttttctgtagcccccactcactgtagcctggctacttagaagggatttaactaaaagtgagaagtgagattcagtggtgaaacatgaaactgaaaagtcagtaaaagaagtcatctttaagagtgaggtttaatgccaacttctcccttgagggaccttgtcacttcaagcctttaataccaggcctgacaaatatttagaaaatgttcaggacttaaccgttttgcacaaggagaggacatgatgccctgatagatttattttttttctccttcatctctagtatctgtgatcctctgaatcctggtaaggaaacaggtctcagaggctattctctgagcagtgtttggtagagagagataatggcactgggattgaagtagatcttcccagaagagagtgaaaggagataaagaagccatggctgcctgctcagggaagtggaaaaggaacttcttgatgggcttaaccttataaaagtgtgatctctggaggaaccggtgggcagtaaggcagagctgcttcatcaacaagtatttaagtacttaccgggtacaacatatttaactagggaaaatacatacttaaagatgactcagtcctttctcccaaggaggttacaatgtatctggggagaccagctgtactgttgtgaaatagtgaaataattatggaaagcctgtatggtactaatgataagaggtggttttcttttttcttttctttttgttttttttttttgaaaatgaagtctcgctctgttgcccatgttggagtgcaatggcatgatctcagctcactgcaacctctgcatcccgggttcaagcgattttcctgtctcagcctcctgagtaggtgggattacaggcatgtaccaccacgccctgctatttttttgcatttttagtagagatggggtttcaccatgttggccaggctggtctcaaattcctgacctcaagtgatccacctgcctcggcctcccaaaatgctgggattggggacatgagctaccgcgcccagctgggagatgagatggttttcttattctttcttttgtggaatagatctcttttttttcctaagtaaaggtcacccagatcccaaatatataaatataattgatcaaggtagcgcagctctggttgaagtgtagaggcaggggctggaggtctgacaacctagcccgcttcagtttcctacttccgccttcaaaggcacctttgccaaatctagggctcctcaaaaaacacacaggaagactggaaaaaaatctgaatgtgtacaagtacttttgcttgagtttcatgctatccctttggagagagagcattatcaatctccagtctcagataaggaacctgagacacagaggggttacacaactggatcaaaactctcaccgcttgctcattttggagctggcatatgagcccaggtctctaaacctaagccctctaaacctgccactccacagtagagcagatgctagtgtcccatgccagagtaagagatggagggatcaggaaggccttgggaagaagacacaagctgagatgggttctggaatctacttggaatttgagtctatgcagaggctaggaacgacattccaagtgggaagaacagcaggaacagtagctgggggtgagggaataaatgtggtttggaaaacaggtttgaattagtttgtgagagggttgcaacccaaggtaaccttgaactctgccatctagacaatgaaggcagaaacattgtagcagaatggggccaagaacacagcagggtttcaggcaggtttgtctgggcattgagggcaggttgtttgggtagagagtgggactggggtcagggaacctagctaggggaaagctgtaatatttcagcctggagcgaggaaggcctgtgctagttatgaaggctagaggggtggaggcttttcaaaagcaggagtgggacagcgagagtgaatgactgtggagagcagtgaggaaaatggagacaaaatgacttctggaatctgattctgagagagaggatgggagatgatggcaagatgatggtgatggtggcaatgactgcagctaacatttgccccaggcttacagggtactaggcactgttctaggctctttacaaaggctgtctgacttcatctgtccacaaccttctggggcagatattactattattcccacaccacccccccacaccaccaccattttacattgcagaaaacagtgcagagaggttttgtaacttgcccagagtcctataggtaatggatgctggaggcagtattccaacccaagcagtccaagtccaaacccattcccttcaccactgtgctatagtgctcctcatagaaaaacgtatccacataatgacaagggcagagaagacctttgcccaatttgatagagaaaaccagttctctcaacttttgtttacttgtgtaatcctgaatttctcaaataggattccatgggacatttttataaaagatctaatgaaaatgtttacagttggccctccatatccatgggttcaatcaatggaggattggagatatttggggggtggggggaattgtgtttgtactgaacaagtgcaggcttttctttccttgtcattattccctaaacaataaagtataactatttacgtagcatttatattgtattaggtattatacataatctagaaatgatttgaacgatatgtgaagatgtgcataggttatatgcaaatactatgacattttatatcagcgacctgaacatccgtgcattttggcatctgagggaggtcctggaaccaatttcccatagataccaagggatgactgtattggttcagggaaaggtgacttaaaattaatcaggcttctatactccaggactactcagccatttttagataatagaataatgtgttctgagaattgccagatggagcctgtacaaagaagtgtctcctaagcaaatccaaaaaactgaactcttttttttctcacagaaaattaactgtgtttctccaaatactagtgttgaatggaatataatttagaaatgatagcatagacgtatagtgagtttaggactagaaatagcactataacaagtcaaatcttaccatgcgaaggtaagaaagtgtcttaattacaatcctgggccattctgcctttgcaggggcctcatttagtcatcactcagacttgcatcactgttcgggcccctccagcccagtgtctgcatttctcttgacaggtggcttccttctgaggccatgtgtaacacacatggcaggcattctttctccctagtaggaagtggctgcacctgttaacagcctgggcccaattactctcaaaaatttggacttcagctgccacactaaagcagcagtccttgagcctgttcagcccatactgatttgatttctaatgacactcctaaaaaggcaaggttctgcagttccattttatatcagggacttctttggcagaaggcaaaccgcagggccaagctcatatggcatgtgcagaggtcagccttcctgtaacaggaggggaccaggaaaggaagaaaacaccctgagtaggttttctgggtacttctgcatctgacatccttgccagccagctgccacttatgtcctgggtctcctacttagttatccaaaccagcacaaatgtgtcaaaccagctctcagcgtttgaagggatagtgtggctcattttcttccttgtgcagcagtcacaaaggataagaatgcccagcctaacagtatggaatcgtgcaaaggagctcaacctgtgaaattttgagaggatcacagaatatctactcatcttctagtctcctgcagcatctagcaagaaactttttccttcccatttaagtagtacctcctagtccatcaagtcttcttgacttgagtcttctttgtaaactcatggggaggactccatcttgggcatgctgcatttagtaacattcatggatattcttgatttaaggtactatggggagtgagggaaaatggttaaaaatctgggtgcccatcccaacaggacttcctggggccatttgggaaccatcccctcctagattatttgtgtccccttgatttactcttaagcgactagggctcccccttttctcctccctatttctttagtaatgtaccgcttggccaaaacttaatcatccagtattcaattccctccagatcttagaatttcattataggctggcaaggaactaatcaacttaatgagctagtggtcttcaagtgtgttggtatttctttctaacacacctcaaagagagtcttctcaatgcatattgtaatacagaggggtgattctcgtagcactaaattggaatcttaggcttatggggaagacatattgagagtaatgtctttaatcctcagagtattccatttactgcctcttggtaggtcaggacccagtctttcatgtgtgaaaactcggacacatctactcctagaacaagctcactcatgacaattcaggttcatatccataaaaatgtcaacaaattgtagcttcagcataaaggccttcttctttgtgtctttgcagtatagtagaaatggttcgcacaaagactctctttattatgaaggtaaatgaagattaggagagcttcatttttggtgcacaataacattagacataataggcgggaaagggtagaaagctccattgatgaagaaaggaatattatcactctcactttcttctgaacctaaacaagttctcaggttttgtttgacatccaaaccattacccaaattctaaagcttagtctattaaagagggaaagtggaaaatctttggtaatgactattttggcccaggctgatataagtcagagggcctttgatccatataatcgatgtgttgagaggagattataactcttagggaaagattgtctttgcaaagacagaagattgggttatttacacaacaaggtctgcatgagtaagtggtatctttgcatatctacataaaatcaggtcaatcaagttcagtttaaaaaacaacaacaagaaaattaccaccaacacaacatattaagtaagttaaaactatttgggaatgtgttgaaaattcactatttaactgctaatgatttgattaaattttatataggcaggaaagatacagaccttcatatctatagacttatgcattgatatatttttatgtgtgtatatctgtctatctgttatagactgaatgtttgtgtccttcaaaattcatatgttgaaatataatctccattgtgatggtgtttgaaggtgggacctttgataagtgattaagccatgaggatagggcccctcaggaatgggattagtgcccttataagaagatgtcagagagctaacttcctctttttccaccacgtgaggatacagtaaaaagttgacaatctacaacctggaagagggttctcaccaggaactgaccatactagcactctgatcttggatttctagcctccagaagtgtgagaagtaaatgtttgttttttataagccaaccagtttataatattttgatagtcgcccaaagtgtctgtctgtctctctgtctctctctctctatcatctatctatatgtctaagttacctatctgtctgtctgtctatttagctaatctatctatctattgtttaacaaatatactctgccaggcacagtgtaaagcacctcccatccactacctcgtttaactctcataaaacatcatgaatgaaacaatggatttttctgtgatgtacaggagaacactggagtcagaaatcacctaaagtaaatgaacaaactaggacttgaattcaggtcttcctgatctttcagccaatgtgcatgaccattgcattgtgctgcctcctttttcctttctgtgtctctggatattgtgtggacatagatatggcaatatagctgtattagttcattttcacactgctataaagaattatgtgagactggaatagtttataagtaaagaggtttagtggactcaccattcctcatggctggggaggcctcaggaaacttatagtcatggtggaaggcaaaggagatgcaggcaccttcttcacaaggtggcaggagagagagcacaaagtgggaagtgccatacacttaagccatcagatctcttgagaactcactatcacaagaacagcatggaggaaactgtccccctgatccaatcacctcccaccaggtctctccctcaacatgtggagattacaattcgagatgagattgggtggggacacagagccaaaccctgtcaatgaccttcatgagtataatagtgatttccatcagaagttttccatgggatctgttggtaaaaattcacctgatgggctttgtattagtttcctagggccaccataacaaaatattacaaactaggtgtcttaaaaaattagaaatttattgtttcatagttctggagactagaagtctgaagttgtggtgttggtagggtcatgctctctctgtagcctgtagaggaatccttccttgcctttggtttatagcttctggtagtttgccagcgatctttgatgttccttggcttgtagctgcatcactccaatctctgtcttcatggtcacaagacattatgtgtatctcaaacttcatgtggctgtcttcttataagcacatcaattatataagtttaggagcccaccctatttcagtatggcctcatctgaactaattgcatcctcaatgccatttccaaataatgtcacatattgaggtagtagtgattaggacttcaacatatccatttgaagctgggggtggagaaggaacccagttcaacccatgacaggcttattcaattacaatgatttataccccagtgtaacttacccccatgtgattactattacttaatatgtcatatatgcttgtgctcagatatcattgcaaaagagtgaggagacctgatataagtcagtattcatttaaaccagattagaaacctaatccaaactagctaaagtaaaagaaatgtcttggctcacataatcataacatgtagcattaagtcttcaggcacagctggattcaggggctcaaaggactcggagctcttacttttacaacatttcttgattctgtccttgcctgttggcttaatacataaatagtctttcactcaatgatagggaagatagcccctagcatccccagattcacttgcgcacatgatgtaagctgaggctgagttcttattgaaaaatttgtgtattagcctcggctgcagtaacaaacaacccccaaataaacaaatatttatttctcatttatgagtctgtggttggcagcacttcttcttggctctattctgtgcatctcttattccaagacctaggctgaagcagagaagccctcatcggggccatgctattcacaatgcagaggacaaaaatgcagaaagttaagccttgcaacctcatttaaagattctatgtagacatggatatttcttatctgcttatagtcctttgggcaaagaaagtcacataaccaagccagacaatgtggctggatgttacagataaggtaggggtgtattatccttttcttagagcaagaaaaaaaaataattgaggagaaaacagaacctagcacaatgaggttggagttaagttaaagacgtctggtgtcacaggctgtgactcaatggttgagaaatgattgggaagatccagaagtaacttttgcccctcgatttgctcccatggctcctgaaactgagggacagtactcaatagtctaacttaaatatagatatgaagtggctccaacaatcaaccacttaaggtacaatccaggaaaactggactccatgtgaacttagaatttctgagctaaacagcatgaactccctacagtgcacatcatgggggggcaagtggatcactgggtaaggagtaatgggttaatttactcaggtgcagggataacatgttaactacccagctgcttaggggaagtaggaccagtagttgagagtccccatttgctctgctgactatggctgcaatacacacacacttaccatcagcttttggccacaaattgaatcccaggctaggagtgaaaggggagcaataccctttaaaccctctctatatcaccctgctttttggcattttgttttgttttattgttttcatttttcacagccacccctttccaccttaactggtctggttacaggttatttccaagcagaacccccattccctattccactgattttccatctcattcaggaggcagggcactttggagttgtagttacctagcaggttgtggctgctgacactgagatatgttaagtaacttgtggctctatctgggacagacagtcttatcgcatgaggctaagtcattataaggacaactaataaaagctgtggttgtgtttgtgtcaatgctggggtagagggtagtaactaagggcacaggctcggaagtcaaactgcttggcttctatttcagctttattacttctttgatcaagcttcttaacctttctaagactcagtgtcttcattcatcaaaaggagataatagtctcaatagttgccctgaggattcactaagtaatccacattaggcacttagtagactggcaagcacatggcaagcactcagaaaatgattattactgtcatcatcatcatcatcatcatcatatcaccagcatcacagataatgttgatgataattatatcaataatgtatcactaatacttcatatcagtaataatgctgtatagcataaatggttcacattcattgaatgctttctctgtgtcaggcacactgtttcagctcttctcaagcacatcttcacgagaaccctaagaggtaggtggggttatagcctcccattttacagatgaagtaactgagcccacactggtaacatcggatactatgcttcttgcaataacacagaactacagcccaaagcaatgtttctttgggaccagaatgcctggtcttaaataccagcaaccccatcctgcttcattggtacagtcagacaaaagcagtcatactgttcgaagagcagtcagccttgagtccacattctatataaatcacccagtgaaaaaatgacccaattagacaggttggctgctgtgcacaattgcagcctcctggagtgcttaactgtaagtctttttgagggccagtgctacacctttgcaaaaggccctgctcatgggtctgctaggtggctggctgtgctgtggttgacctggcccacagataatgagggaatttatgtctgcagaattatgatattgcattgaatgtttagactagactatgaaagaatgggggagtttgaatgtttttcctataatgattaatgttaggcctgttggggaaaactgcacactgcaaaatcccaaagatttttcaacaacctctgattgcttttggaatcgcaaagcaacattttcaggagacagttttgacatggcacattttggagtccctaaacagggagctaattatacatctacttagcattaaggatatctctgaatctctgagtgcctgaaaatgttccaatgaaagtcatatatttattcctggcttttatcccaaatgaaaaacttcctagactttcctcctttttcctttggaatatatattgaatttattttctagattttctccaatagaggaggtacaaaaataaatatttgtactcagcatttatgtcctgttatagcttctgattactttggttatcttagcagttgatttaaattgtcacagtaaactaagctattcttggtaatatcttcccagcataacaaagtttatttgccactaatgtaaacttttgaggggggggttgttttgttttgctttgtttttgagacagggtctctgtcacccaggctggagtgcagtggtgtgatcatggctcactacagcctcaacctcctgagctcaagccaccctccaacctcagcctcccaagtaactgggactataggcacgagctaattttttttttatttttgtagatatggggtctccctatgttgcccaggctgtcatataaactcttttaagggactggtggctctctagggccaattttcttacaaactcccttataagagatctattttctgtattgtataattctgacacctgggcctgcagcctctgtatcactgagacagaataagagagagctggagagtcatgtgctggctcttaaatactttggcctttaaggtagcattttcattcagagtcccttggccagaactggtcagagtatgctcacttatctgcaagggaacaggaaatggagcagagcacatggatattcatggaatagtatatgtcttttccataccaccgaatccagttcctctgcaaggatagtgaaggctaacagatcatgcatgctatcagtgctatgagtaaggcagcatgggagaaaaaggaggcatagattcttctggctgagatttacatgttttctcccacagatctaattttgaagttcgagggctccctgggctctcacatcctcctactgctggtgcagagatatgagaatatagaggcccatgaacactgaggcgctctaaggaaatctcatgtttaacctcccttaactaaaaccctgcattgcaaatatgaacctttaattagatgcacatagatccatatagaccaaagataagttttcagaggccaaggcactagaaaaaattaattgtgtagagattacttcaacccacttaatattactatccatagttgaaattcatgtcgttagttccatgttatttggccaaactagagtgattattgtaattaaccatgactttcttttggtacccaatgtgtaccatatacatgtaaaataaacatcattctgcatccacattttatcttttttttggttgtttcttcaaagtcattgtgcttaaactagagaggctttgaaacacaaattaagattttcttttttttcttggaaaatttacataatacaaaatgagttctgtgaataaatttgtcttgcttattaactaaggaatttggtaggatacacacacacacacacacacacacacacacacacagagtaccattggttaaaaaaacaaaaacaaaaaacctctacttcttaaaaaagtataaaacttaacaaactgtgtacttgtaaaggaatcacatatcatattggaaagagattttcccgttaagtctgccttaaccaaagatatgacatggctgaaatactgtttttcaatgagtggtgagttaattttcttggctcaaagatttaatgtaatttggtccaagaagtcaggcaagtgccttgtgaagtgtatgtgaaccgttgtatctagcgtctttctgggaactttgcatttctctttaagaagaagcaaacttcaaatagccatactttatcatccgcagccacatacacttggctgggataactttgcttcagagtataaagaaagttgtcaatgactaagagatacatcaaatatgctttgagagttatagcagaaaaccaaaattatattgatttcttagaagttactgaagcaacacagtaactttcattctaggttttcctacttagtaggtacatgccaaggggaaaatgtcttcaatcctggaggcaaagaaaatgtgttttactgctttctctttgtttcttgtttctgatgattattttttaaaaactatgaagatagaaaaaaggatcacagtctgacagagttcaaaatgaaaaatcaaataaaaccactatttctttgccttaaatatcaaatgatcagtcatgtctctacctttttccacagaattgaacatttgtattattccataatgttgccaaaatgtggcttttcattttaattttaggaaagatcaaaaagggttcttatataagtctcttgaaatggaatagaaatgtctccctaagtgcctctttaatgtgaggtgttgtaattcatctcgagatgagcaatttatgatcaaatgtcaaatttgcagagaacgatggattccaactacaaagacttagatggggcaaatggtagagagcaatccaacatgcattaatttaaaggaagttaaaaaatatacattatctgtagatcttcttgtgtttgtgcctacacaaccaaagtaaatgaaaactgaaaatttcagacaactgaaaactatttgatttatcacacagtggttaagaccctttggcatgagagaaacctgaatttaaactgttgccccactaattcccgactgagtgaccttgtccctttactgccctgtgcttcagcttcctcttctataaaatagggatacctatggtattcatgttaatgattaagtgatatgtgcctgtaaagcacttagcatagctgctcgcagtatctgcatttatctgaatattagtatacattcctatacatatttcattgtcacccagcagaatgacaattgatgtcatgttaaccacaccttctggtgccctataccacagtactttgtatccagtagacaatcagtaattatttgttgatgttctgtcatagaaatgtctgttatttttgccatctctgactttaaatgtgattctcttggcctgtgttattccaatttaactcagcagtttgtccatcatggttgaataactgaccagtccagtgaaaagaaatcagtcaaacttgttctttgactgcagggcctggtttttgctaaaatgtgaggaaggattagatgagatgctgaccgcaggtaacacaggcacagccttagtgggtggggtaccatttgtgctataaaatggacactgcatggcatgaagtcaggctcaaaagctcttagtaaatattggtttactggcttgttaatgactgacatagaaggcatcattgacagctgagttttaccattaaatatcactgtctttaattgtgtgagaggattttgaaatctgttgagggaggcatataaaaaagaaagtgtattatctctgagagtgcccttaggatgccataaggtggactaattatttgccaagtggaaacacagtgtaaaaaaatggttttattctaagacttgcagtaattatcaagcaaagccttactggagccatatgaggaatttggaaatgtcctggggtgtttttaattgttacattgatgataaggtcactactggcaattggtgggcaggggccaggcatgccacacatccagcagcatgtatgagacacacgctgagactcccgtgtatgagactcgtgcgcactcgcgcacattgtgtctcctacaatgccaggttaggggctgagaaacactcttgagtattgaataaaggcactgaagggtcatttccccaagaagccttacacatacttaccaaatacccaccatatgcctcacacttagaatacagtgagtagatggtgagaggagcttatgttcttgaagcagccaataaacaaactgtaaacatagtaaataagtacaatatatattaggctaggaggtgaaaagtgcaaagaaaaaataaagaacaggttaaaccaaatggaagttgctggaaaagggaactatattacaattttaaagtagggtgatccaacatggtgaaaccccatctctacaaaaaaattagctgggcgtggtggtgcgcaactgtagtcccagctactcaggaggctgaggtgggagaatcacctgagccccagaggccaaggctgcagtgagccaagactgcaccactgcactccggcctgggtgtcagagtgagaccctgggtctaaataaataaataagatgatcagagtaggagagaataatgcagatagggaaccatactgtggaattaaactggagatcgttaaagaagtcgtgtttgcagggatgcttaaaactgtggcagaataataaagtgagtttcagctgtcaatattccttatttttagcaagaaagcagccttagggacattactataaatgatggataaatgcatagatggatggccggatggttggatataaaatggccattaaagaatcaataagaatatcaacatttcctgtgctgggattcagtcactcagtgaattcagatggcctgtccttcaaagcttggcctagggtagattgggcaaatgattcctgagaccaatagtatctcagtccattgacttttttcccttctccacccaagacacctgtggaaactattagtcttctatagaatgggcttcagtaatgtgtaagataaactgaggccttcattcaaagcctgatcttaaactgtctgtgccttagacatggttttatagcctgagcatttttctgagtattcagtacatcaggtgtgggagcaaattgatattggagaaatcttcatggacagatgtggctaatgttctcagcttctctctcgtcctctgaggccaaaagtgaagtgaaataaaatagccaaagttgcaagaggatttatttctcctttgaaccacaacagaactcaactatccctctagaaattgaaattgtctatgataataaatgaaagtgccattaacacacactgaggctcataggaagtggttctgccaaaagaaacatccataaaaaagcatactcgaaaagaaaatgacaaggtctgaaattaaagatcaaacaaatagggatgatcttcatagaaaatccatctggagaagaaatatgaactaaagcaaacaggcaataagacagcagcattatgcactattgaaaaagaatcaaaccctctgcaaatcagcaagaagggatgctgttgaggtgctagtcagaagacagtaggaggccccagagggagactgcaacacttcaaacaacaaacccaaccacacaaaatgtttgctttattttaccaaaacatacacagtgctgcattttcaaaagtcctttgaaaacctctttgcagaagtagctggagaatcctaacagcaaagctcctcaatagggaaaagtgtgcaaaggcttagaaagataaccaaaagaaattagtctacaatggtgggggttaggagagggatgggtggaaggattaaggaaggaatggttgaaaagaggccgagagagaggatagagaaaagttagaagttggaaaccagtattggacatttaaactactttgaacatattgatttaacacactgaatctttgtaatattgatgtactcaccacatcttcctaacagaaggtggggctcacttctccctttagcaagtgattctttttgaagtatcaagtttcatccaggctaaatactcctgccagtgagaatgcaaaaggaatgtagtataatatgaaattcccccaatttatttaatataagttttgctacatggctgtatgaaaattaccaaagggcctatcaattcaaaggctggcctagttcctctggatactcaaaaatattattataacagacatgtattgagttcttaatatatgtcaggtattatgctggacacctagcatgtgctgttgctttcaatatacacatcagttctcaaggctgccaagccagtgcatgtaagatacgcaatgcaaggtctctgcctcaccatctaattagtttctagtccatgcctctattcccattcttttttacccctttccttcttctttaacactctctctacctccctccgtccttctgtacccctcctccaaccttctttccaaatatagggatagagaaagtctaagagttctttcagcagtgttttgtagttttccttgtacactctttcacctcttggttaggtatattctgaagtattttattttttgcaggaattgtaaaaggggttgagctcttgatttgattctcaactaggttgctgtcagtgtatagcagagctactgatttgtgtacgttaatttctatcttgaaactttgttgaattcacttatcagttctgaagctttttggatgagtctttagggtttcctaggtatatgatcatatcatcagcaaacagcgacagtttgacttcctctttaccgatttggatgccctttatttctctctcttgtctgattactctggctaggacttccagtactgtgttgaatagaagtggtgacagagggcatccttgtcttgttccgtttctcagagggaatgctttcaacttttccctgtgcagtattatgttggctgtgggtttgtcatagatggctgttatgacattgaggtatgccccttatatgccgattttgctgagggttttaatcataaagcaatgctggattttgtcaaatgctttgtctgcatcttttgagatgatcatgtgattttttttttaattctgtttttgtggtgtatcacatttattgacttgtgtatgtgaaaccatccctgtatccctggtatgaaacccacttgatcatggtggattatctttttgatgtgctgttggattcagttagcaagtattttcttaaggattttgcatctgtgttcttcagggatattgagtagaatcaatattgtgaaaatgaccatactgcctaaagcagtctacaaattcaatgcaattcccataaaaataccaccatcattcttcacagaattagagaaaacaattctaaaattcatatggaaccaaaaagagcccacatagccaaagcaagactaagcaaaaagaacaaatctggaggcatcacattacttgactttgaactatactataaggccatagtcaccaaaacagcatggttaaaaataggcacatagaccaatggaacagaatagtgaaccaagaaataaacccaaatacttacagtcaattgatcttcaacaaagcaaacaaaaacagaaatggggaaaagacatcctattcaacaaatggtgctgggataattggcaagtcacacgtaggagaataaaactggatcctcatctctcaccttatacaaaaatcaacagaacatgaatcaaggacttaaatctacgacctgaaagaataaaagttctggaagataatatcagaaaaaacccttctagacattggcttaggcagactttatgaccaagaacccaaaagcaaatgcaacaaaaacaaagataaataggtgggacttaattaaactaaagagcttctacacagcaaaaggaacagtcagcagactaaatagacaacccacagagtgtgagaaaatcttgacaatctatatatctgacaaaagacgaacatccagaatctataaggaactcaaataaattagcaagaaaaaaacaaacaatcccatcaaaaagtgggctaaggatgtaaatagacaattctcaacagacaatgtacaaatggtcaaaaaatatatgaaaaaatgctcgatatcactaatgatcagggaaatgcaaatcaaaaccacaatatgatactaccttactcctgcaagaatggccatgataaaaaaaaatcagaaagtaatagatgttggcgtggatgctgtgaaaagggaacacctctacactgctgatgggaatggaaactagtataaccactatggaaaacagtgtggagattccttaaagaactaaaaatggaactaccatttgatccagcagtcccactgctgggtatctacccagaggaaaagaagtcattatacaaaaaaggtacttgcacacacatgttcatagcagcacaattcacaattgcaaaaatatggacagcccaaatgcccatcagtcaacaagtggataaagaaattgtggtatatgtatacaatggaatactgcttggctataaaaaggaacaaattaatggcattcacagcaacctggatggaactggggactattattctaagtgaagtaactcaggaatagaaaaccaaacattgtatgttctcagtcatatgtgggagctaagctatgaggatgcaaaggcataagaataatacaatggactttggagactcgggggaaagcattggtgggggtgagggataaaagactcaaattgggttcagtgtatactgttcaggtgttgggtgcaccaaaatctcacaaatcaccactgaagaacttgctcatgtaaccgaataccacttgttcccccaaaaacctatggaaataaaaaaattaaaaataaatatatcactaaatgcagatcatttatatattttttttaaaaaaaaactctaagaaccaggagcagaaggaaacagttgtaatcttggcactagatgctttggtggctggcacatggtggggcatcagcaggactggttgaatggctgctgggtaagcactggtattgaatgctgcactggtaagccagtcttgtttacactaccaggcactgttggagcaactgagggagaactctgcaaggcagaggtgattccagttagcatcccatctgctctgtgagagaatcatattgcacttcccagggggtgggtttgaggaaaccacatgaagaggcaaaactgcagctgtctccttgcagataatgggtgtggagtgttttctatggaagccaccacaggacactgacaagaggcaccaaatcctcagagcactctttaccccgacatgagcccaacaaagacctcttataaaagccaacatcagttgcttctgctttcacaaatattatcatgtttgttttcttctactcttctgattgctccttctcaggtttattcctttgccagtcctttaactgttggggtttctcagaatttcttcctcaaatatcttgcctctatgtttttccctctttggtctggtctgctcacctgaaacctgctctcatctccaagatggtggcgctcaagcttgacctccagccccacctctctcctgaatattagactcatatttccaactgcttcctggacacctttatctgcactttgaattcagaaagtccctaattcgaatcttactcaccttcccataaacatcttctttcctttcatgacactcatcttggttaatgacaatcacccaagcctccaagttggaaatatgaaactggtaacttctgtttctcatacttttatccattcagtcagtcacaacttctgtgcttctgcctgtgttgtgtctcgcacattgttcttttctcttgccctgactcagacccccatcaccaccaccactctaaattgtcttccttccccaccctctgtgtgaccatagggatctttccaaagcagaggtctgcaaacatttgcaaggtacccagtgacaaatatgttaggctttgtgagtcatgagatctctgttgaaactactcagctctgccactttagcactaaagcagccaaagacaatatataaacaaacgagcattgctgtgttccaataaaactttatttataataataggtggcaggtctgatttggttcatgggatgtagtttgtcccatcctgttctaaatcgtgagacatttttctcacctacacatcagtaactcttctttgctaagggtagccaatcttagccctagctttgaatcagaatcaccatggtgccctggggcctaggcatgtgtaagttgttgtagtacctggtactaagttgttcactgtacatgcccactggtctgacagctgaggatatgttggcccaaagaggatgatcatttgccgaagattacctggacattagtagtattgttggactaaaatccaagtcctgggttctttgtacttctctaggctagattagctagtaaatgttgaaaatgaaaccttggttctcagcaaattaacaggcaaggtatatattcattgtcttagtccattcctgtttctacaataaaataccttagcctgggtaatttaaaaaagaagtttattagtcatagttctggagcctgggaagtccaagatcaaggtgccagcggattgggtttctggtgagggcttgccctctgcttctggcatggagtcttcttgttgtgtcctcacaggaagaaagagacaaacactgtgtcctcacatggtggaagggagaagggaccagagtgcttgcttcagtgtcttttatataggcactaagtccattcatgagggtagagcccccatgtcttaatcacttccccaaaggctcctcttaatactgtcacattgggtcttaagttccaacatgaattttgaagagatacattcagaccgtagcatccattaatagaggaataggtaaataaattatgaggcatctgttctatggtatgattccatttgtataatgatggtaacaacaaaaacaagacatatgactatgtatttagatgtgtgcaaatatacagaaaaatgtctggaagaacacgagcctgtctgctaatacggctacctccagggaggggaccaggactggagcagggtggtcaaagaggttatattcttatttctattttaacatttttcctatacaaataatttctaaaaattaaattttttttcaagaaaaagaaaaatagggatatagcactggtaattgtctccacaaagcaatatgaagtacagacaaacatattgtctcacggaaaataactgagagacacagttgctaagatcaggaatttgtgggacctaatttggtccaaactaggcaagaacctcgagaaattggtatgtaatttaggtttgtgttacagaaaagaattggcaaagaccataagagcataatgctttccacagttaaatgtgagcaacctccccaaatccagaactgtaagaaaagaacggtttctttgctaacccagtaggccatattgttaacagaagttgtatccgataaaagatctatgtttaaactataagatgcaacaggaaaaaagaaacacagcatatggaactgtttctacaccacttcaagtcaacagagacaatattttaaaaataaccaggagaattctccaggatgtttctttttatctctcttctctgcattgcgatttttactgactctgacacagagtagtcattgcaaaaaataagaagccgagggctagtgtcatatccatgctgaagaggtgtttagtttctttcatcaaggggcagctgggaaggaaagcatttctgtgtgcctttgccttggggaagacctgtctcctaagaactctgtgcatgtgatctgcgctgttgaaggagaaatgggtgagcagaagtgaccgcaccctgtaacttcctgtgtccaggagagctggcagtcggcccggtcttctgagacatccagtaaaaatgaatcccagttacatctgcggtgctcacagaaatagatctgctgtatctaataaaagcaaatgttactttttgtaaagggctgccgggtcacattcggaatggtaaacaagtcccccaaaaaacttatttttgaggtagagactgtgtagaatcacattttacctcctggactattatttacgtgtatcttactgtaaatgactcaggattaaggagaaaaaaacaccatcttcctttgaagagaaagaagggaagctggtgtttctagcagtctctgcgaaaggtagagattccttccacatccgtgaattaaccccacttaggagtgggcaccctgctatatttccattcccaaaccttgcacacgctgtgttctcggggaggctgaacaagctgtgggtctgaattgcgtgtctggcttgcacagccccacgtgggccgaggggaggtgggctgattcataatgaatgctccgggtacttagagtagggcagagtgcaggggactgttattctgctttgaagttttctgcctccctctttggaatggatcaaaggcctcctttttttttctttttagaattcctataagctcttaatacagtgctctcctctcagttcccctcctcttctattgcaaattcctttcccaccagcctcagaaccagaagttgtgggtgtccacacagtggtctctatagtttctccctcccttcctctctttcttccccccagcctctcgtcctttgttttatctttcctttctttctttctttggagtgcccctgaagctctcagcctcagcttaaggaaaacagctagtggatctctgaaagtgttctgcagctcatttcttgctagcaaaacaagaaatatgagaatgttttttcttccctttttttaaagaaggaatctggattggagagataactgttgtgaataaaacaggtgaaactgacttgactagttgctttggaagccgaaacgaatgtgaaacaaagctcttctgtgcctttaaaaggctggaggatggtttctgaactattcctattgtagcttctgaatttgttcttctttttcttttttcttttctttctttctttcttttttttttttttttttagtgacgggtgttgctctgtctcccagggtggagtacagtggcacgatcagaactcattatgcagccccgacctcccggcctcaagtgatcctgcctcagcctccctgatgtcatagccacagcacaggaaatcatactaaaagtggtcctcctgtgcaatgccaagggacagttccacacacccgtttggtggatagtcttacatcccagatggctcttgttccaactggtaataacatgtaacatgtgagcatgttcttttgccaattgattttcttctgatcttagcaaataacctatctgggatagcaaacctgagaaacaggtacactaacaacacacacaaacattaaaattacattaaaatcttaaagccttaaggcaactagtttttagaaaacagaggatcttatagatggtaatttagaaacttaatgcaaaaacaccatctgctaaacctcctatctacgaagacgctggggtctgcggagagcacagcctgtatctggagttagctccatctgcttctacctgctccctgggaatcttcttcactgaacaaaggtccacttttgtttaggtcccacgagtttatactggtctagatcaagatgctattcaagagtctgtccatcccaccctgggtctcttgcttaagtctcagtcacttcatttggaatatgctgattttctgaagatctccagaggattcattcagcaaatgtttcctgagcataagacaatttgccatatcctgaaggggacgtaaatgtgagaaaaacagggagtatggttcaagagaggggataagatcgttcaaggagagcaaagttgacatggtgagaggggtacaaagactgtggaactttagggaatagaaatctctcagttgatctggtaggataggacttgattgtctctgctcctaccttctattgtgagttcatgctccactttcctgctccctgagcacctatcactgtctgcaaacaatatgcacttaggtcatcccagatggctctcattcccactagtaatgacaggtaagcatgactcaggattctctgtcacacctttcctgggacctcacagcatcacatggaatgttccttcttttatctccaatcatgccaaggaagaaatccacagtattataaacccaaactcactgtgattgttgttattattgtttgtttaaatttttaatgaacgcaaaaagtccacatctaattggcaaaaatcatattgaagatgacatatgtgatgataactgagtgtacactgtgtgccaggtgtcacatatcattccatggaatcctcccaacaagcccaagagcaaggatcactgtccccatttacatagaggaacttgaggcacagaagaactcaccagcttgcccacagtctcacagttattcagtcttggctgtcactctctgtgagacacagcctcccagatccaggacttgcagaaaccctgggcaggcctttctttgtagtttttgtcaggtaagacatgccaagtgggcaagtgggtttttttgcttcatgacaacaaccagaaatggcaaaacattttctgttatgctttgaagagaattccatactttttcttggaattcactttccttattatttctgcttggctctagctgatttaaattttttttttatttctataggttattggggaacaggcagtatttggttacatgaataagttctttagtggtgatttgtgagattttggtgcacacaccacccaagtagtgtacactgtacccgatgtgtagtctttcatccctcacccccctcccactcttttcccttgagtccccagagtccactgtgtcatttttatgcctttgtgtcttcatagcttagctcccacttataagtgaggacatacagtgttcggtttttcattcctgagttacttcacttagaacaatagtctccaatctcatccaggttgctgcgaatgccattaattcattcattcctttttatggctgagtagtagtccattgtatatatatataccacaatttctttatccacttattgactgatagacatttgggttgattccacatttttgcaattgcgaattattctgctataaacatgtgtgtgcaagtattttttttcatataatgacatcttttcctctaggtagatacccagcagtgggattgctggatcaaatggtaattccccttttagttatttaaggaatctccacactgttttccatagtggttgtactagttgacattcccaccaggctatagatgattttataaaggctacattccctttccttccatagtggcctgggctgcagctccaggccaaagctgaagttaaaaaaacaaaaaacagacagacaagacctcattcccaggcagccagcaaagcaggtaacagatgtggatctagggatgggccaactcttaatttccattatgctcaatccaggttctccgaagcaggtgaagtgatgtaatccatgtgatatactaagcacaatattcacacatggtaagtgtacaatcagtatcacccatttctatgaatagtgtggctttatgctcatgagctggaatgtgtactcatgactgttaagggatttgctccttcactctgcagtgcaatgatcttatattttttttcatatttattcccccactgcatggtagcctttgtgagaacaggaggacaagcagagtcagcaaagggaactacacaagaaaaggcaatttccagtagaagaaagtccaaagggaaagggcctctatattgggagctccatgagagagggactgtcttttcaagctcctagcacaggccggatgctctataaatactgaaggataataggggagaaatattatgtttaaaagctgtgtggcctaggaaagaaataggacctatgtggggacaagggatggagtccacttggtcctccactcctaattataaagggtctcaaatttcgacatttgatgttatttccaaatgacttgttgaatgtcttatgtgtgctaaagcatgaacttcttaaatatagacatttataaaatacaaccaaaaacttaagctttatcacattcttttattttgtaaaatgtcagcagcctcaaaaattgccatttggaaacacctgtcttgacccagaaacctgtctttcactcaccttaggccaagaccatacgtgctctggcacctggtggccaacaccaaactgttggccgtcatttatttcttccagatattttgaattttctgactaacttgtctgaaatacaccacagacgcggagcattttccaacaagtctgatgttgttccatctcagttttaattctgaagctgtgaatacttccttgaaataacagcagcacatcttttctttgctcaaatcctccttgtttaatttgccaaggatagcaggctttctcctccctgaataattcaccgtcgggtgtgtgtgtgtgtgtgtgtgtgtgtgtgtatgtgtaaatttttttacatagagggcagtcggatgaatccgtccttttagaattgtcagtgacagacaactatgacatcaggtcatttgtgagcacaccagcccactgatttggcatctcctagcatcccacaccctgctaccatcaccaaaccaccattaactcttgtacctcagttacccccttcatagcctaaccataggccatgcaggaacaatgacttatctagctgtttattgagtcacgtgtatgcccaaccccgcaccaggagctaggaatacaactgtgtgcaaggcatacttgggtccctgaccttttggtggggaagacaagcttcccctcacccctaaaaaaccatcctaataaataagaatatctttgctattgcaaaaggatcaacaaaaatcttgcctcgtgttaaattcttgacaaccctcccagcttattcttaattctttaagctcttttaaaatcaaccttcctgttccaaagactacctccaaatccttgctctatcccctctcaaaaatccatgaatttggatcccagatttattattaagtaagcgttccaggaattattatttctctcttcacatgctgtgctctctgggagcacaaacagtcgccttcttaagctggcaggaaagaatgcgagggtacgtcctcaggcgaaccttatcgagagccagaagccacacatttccaaggtgtaaatatgcagccggtggtgcaggcctgggatgcagagccccatcaaagtgttaacataaaataaggttgacagtgccacttcatcagaaacaggcaacaaattagacgttatgaaatgcttataagcctagggagtaaggtgctcaaagacaattaccaactaaacatttcattaatgaaataatgattaattgtaattactaattaaaattcaggattatgctgttggttttgagcagtaacaggagtaatgacattaccatttttaatggaattccaggaatgaaaactataacaactcacagaaaagatatggcttgcaagcgtgattaggacttactgttaaacccaggggcacggaattttccctgctggtgaacttaagtaagtttaatgtggtgtaatttaattactgagcgtagttttcttctcagtgggaagagataccaggtttatgctttaaagaacaaaaggaagaacataaatagctatgggtaatgattggctactagcaggaaaaatcaaacagcatttaactgtcttttgcataacatttgagggtagatgcatcctggctcggttgcaaattttatttaattaatgcttagaggattaacaacaaagtagcccatgcagacagggaatgtagtcctgtcgagtgtacaggaaagtgaatttccataggaaggacgtctccactgaataattaatgtgcgtgcattttcataaatgtcaaattcccacaggaagcagaaacttgaccctctgtaataaaccatttaggattcattaaatataagcatcgttcttaaactgtttgccatggcacatgagctcatccataatgcagcatgctggccttagctgcaacataaaaatgcccagcgcttggcttttaggcagctgccgttaccctgagtgtgccgacttcttccagtctgactcagatctagcccctgtgggtgagctatcactcacttctttctgacttgtataaggccaagatcagtccagagtcaatctggaaagctaacatttaactcttcctcaaagacaaggagggcctcagaccctgtttagaccttctgtatcagggttccatgacattggcactagtatcctgtggggccagatcatctttgttgaggagtgactgtcgtgtgcatggctgatcgtttggcaacattcctagtctctgctcactagatgccagtagcatctaccctctcccaccagttatgacaatcaaaactgtgccaaacattgccaagtatcccctgggggcagaatctcccccagttgagaaccactgtgtatagatcttactggagtgtatccacctaggtaggatgagctgccacggggtaggatgagctgccaagggggcacaaggcttcctattcagctgggcctgtgaggctgtgggaatccataaccccttgtcaccttcacaatcacagccatccacaagaccaaatgtgccttgctcttgaatagtattaactgccccttacagatccaaatgtggctatcacagtggcagtaagtgcgccattaaaatgaaaaccatttactctagtgacccagagctgtcttatatattcctctctctgcagcagtgactgtttccttttctttatgtatcaaaattactagcgctgtgagcaacccccaccattgtcctggacttataaggagtccagtaaatcactaagtgattttctttttcttccttcctttctttctttaaaaaacaaaaataaattttctgagattagtatgggaaaagaaaaagcaaatgagctcacccgtggaaatttttatcccaactgtttctaaagtctgaaaacaaatcacattttttcttttaatagaatatagatttgatttcttgattttaaaacatgcacttttaattctgtctgggcatgcaggatgcccacatgctggctaaaaaaagaaacacgaagctatttggagaatcactttgtctacacaaaagcagaagctgatttgactaatgatttttctcctctttgatttttatttgaatcaaaatgagcagttagttatatcttggcaccccactgccattgcctctgcattctcctaaaataaagaggatttgatgtgcttagtacagatgtgttatgagagggtgacataagtgtgcaagggcatccttgacgttgtgttgtgtccatgtgacatagtaactgggcacaactcatttcacactgagaggttgagactggtcagttattggaaacccagagcattctgattttctcttgtgacaacagttccactttggcctgttcataaatcacactggcttgagagcagaccatcacaagtatgttttctttctagtattccactttcaacagacatgttttaaattaaccagccaaacacagttcaagaatcagaaccagtgagtgaaaagtctacttggctcaaaacctgactcagtcttattaattcagaaagcagaaagcttacatgcgctaattaccaaagctactaattagctttaattataagcttggaaggaagttgaagtgtgctgcattcgatagtgctgttgaccttttcagtgtactttggagggggagggtggagaggcataaaggaggtgttataaaattcatcagagagcaattaatttatgtcttctgatgaatatgctataaattaacacatctgtgtatatcagaacataaaggcattttaatggagccttaccagtgtcaactctgagtgccccagccagccaagaaaatgtactcgtttggtaagttatttcttattctaccgctattgtaaaccatgtggcaaactgcatccagccaggtgcatgcttctatttgtaagtcataattaagatagggggccagctttgattgatttgggagggtcactctgaggagctgcccttgcagacatttcatgaggtgctcagaaatctgtttcatgccaaagtctggaaatactgtccccattggtctctcaccagggtcttatttgtcactctctctgagcctctacagcccaaggctcaaaccgtgcctttgatgtggctgggatgctccatgctgtttttcatgtggtaagacagctcctccagtactcctcctcacacaaatgacgatggctttcagggaccaccagtacagcctttcacacctcagaagaccctcctcaggccccaggagccctctcacaatccccgtaagaggcacctaaagcagaccagcatctgcttgctgtgacttgtaaactctgagtccccttatcctctagatttgaagcttctttggttaggttccaatctctcaaaactgacgtatcccctagtaaccaccagagggatcccatataatgtgataaaaattataatcaacatggaggaatcacagctcagccagcgtgtgcttgcttccaaggccccaggtctctcagcctggaaaaggagagcggggaacaaaggaggaacaatgtgagggaaggttctccttggcagcttcggggaagggatcctcaaaggagaggcacaggtctgaagacggaagtgtctgaggccaatcttctcttctcctggaaacaagcaaacaaataaaacaaaccccagtcattacaaagaaagccctttgaaaatcagtgaaatcagaccctatttgtttctaaacccgtgttcagaagttgaactccaaatataatgagatttttttgtgagaactaagagccttttccatgtttcaaatagggttgtacaattgtataaaagaagagggaattgggagtgtattatgttagcttcctaggactgctgtaacaaattggcacaacatgagtggcataaaacaaccaaaatgcattccctcccagttcaagatgctggatgtccaaaactaaagtgtcagcagaatcatgctctctctgaaagttctggggaagaatccttcctttccgcaatctttggccttctttggcttacagcagattcactctagtgtccgctttgtcttcacatggccttctgccctccgttgatgtccttataaggacaccagtcacggaatttagggcccattctaatccagtatgacctcatcttgactaataacatctcccaagacctctttccaaataaggtcacattctgaggctctaggtggacatgcatttttggagagcacactcttcaacccagtatgtgttccttaactatttatgtaaacaacatttcaagtttaagccctagacacaaagctgggctgatactgtagttctaacatgatttccaggtcttgggatgaaatccatgatcaccaccgggaaaatgatacttcagtcaccgtgggtttcctctctgctttttaaaatatagtttttcaagcacaatgcctctcctctaagctgttgtaaggcttctgtcggagagtttttggtgtcttttgtgtgtgagtgtgtgttgtgtgaagtatcagaagacattgtttctaccccgcagtccctttgtagctaattttattgccctcagctgttaggtcttatagattatccccgagcctattgggccaaatcggtgtagttaaagctcaagccatccttgtttatccctgttcttaattcatgtctggctgcccaaacggccaactgaaactccagatcagctcagcagaaagctgtatgttcaggtcaaacatgcttgagtgagaagattgtctgcagtgtgtcaggcaaattggcaagcaagtgtcaacagacccggaggtgggaggagaatgaaaagaggggaaattagcaaaaggagtggacgtggttggacctgagttttaccgtagggtagagactggtcatcactggcagaggtggggttgtggggaaaaagggagatagtcccaggggcttgtcagagagggcctccatctccaggtcagaaaagccctgaagagccagcctttcaagcccacttcttgttcagaggcccctccgcaatatccctaccatgtggacttctagccttggcctgaattcaagcatcctaagtcattaccaagccccctttcaaaccacactcttcatcctgcaattttcattatgttaaaaaagcatctgcttccccagacactaaaggccacatattgtatgattccatttctatgaaatatccataataggcaaattgatagagacagaaagcagataagtggttgccagggactgggggggtaggggaaaggggagttaccacttaatgggtgcagggtttcccttcgggataatgaaaatgttctgaaactaggtagcggtgatgtttgcacaacactgttgaatgcactaaatgccactgaatgatatactttaaaatggctaaatggtggattttatgttatgtgtgtatgtttcaccacagacatataaattgctttcttccgatccacccactagttatctacctgctccatgaaaccaaacaagtttaattccttttccacggcccacgttgttaatgtttctttctcctgtgtttgcggaaaccatcacgcacccccaccccatatctccacttctcatgactactcaccctgtgtcccagaattgtgcatctttgaaacccctgatcctgggtaccctccaatggatatatccccttttctcattccttttctgaaattatgctgctgctgggatatactgctgccgaggaatatggacagcacatgctacagaataatcacctgctttggcctgggacttggaaggtctgggtcctgactttaactctctgtgtaacctgaatggtaaacaaatcattcagcctcagtttcttcacctgtaaaatggaagacaagagggcttccaaagccttttctgactttcagacttctaacccaccacatagctctggaccttattcttgctgatgacaccccatagtgtgttcctgtttggcatccctgctatgctactaatacccactgagctggaagttaaccaggcaggacatcttcctcactagggttaagctagatcttccgcaccccaacccgcaatgtgtgacattggatttggggctccagatggaagattgcactaggatcctgattaaatgctgccccataagatggaatacaacattccaaaatgtaatttttgatcttcattgcattatctaacctatgtatatatctcttattttgctctcatagagaaatctgtgtgtgttctcaggcaagtcccttagcagaattttggataagagagggatcacagccagagtcccatactagcccactgaagatttctattctggtgttttcctcatctccagaagtatggcaatggtcctgtttatcactgttctgtttctggaactgtctgagctgagactaaataattaatagaggggctttctgaagatctttcccttatctttttcttgatatgaggactacacttgtattttggtggtttgcatttgattttgttgttctcattgtttctccagtgataatttggtttgagtcactaagaggacacccccatgttccacagctgcattctaaccccatacactgtggagatacacatatatatatgtatacatatatatgtatatatatatataaaccctatacccatatatatatatgatttgctcaactgctttaactcacttgcagtaacaatgactgtggatggtaggagagagtcaagcaggcaaaattctccttgatgggaattgccgctggggatctagaagctccacattcaaggttttgaggtagccatgaccagtctaactgtagaagtggaacgaagcattggaaagagtataaatttagagctctaagaactaggttcagtttcttccatttatcagctttgtggccatagtcaagtgtttgtctccctgtgcctcagttaccttattacaaaattagaaccattgtgaggcttaagagaggcctaaaaattaactctaccatttacccctcttgccacataacacatgtaatgtcctaggctttacaacatccattttcatgtagattattccccatgatcttttttttttttttgagacagattctcgctgtctcccaggctggagtgcagcggtgtgatctcggctcactgcaagctccgcctcctgggttcacgccattctcctgcctcagcctccggagtagctgggactacaggcgcccgccaccacacccggctaaatttttgtatttttagcagagacggggtttcaccgtgttagccaggacggtctcgatctcctgacctcgtgatctgcccgcctcggcctctcaaagtgctgtgattacaggcatgagccaccgcgcccagcttccccatgatctttaaaagtcaccaaagaggagaggggagagaagtagtgtctacagagtagcatacccagcatcatgctcagtacatggttaaccctcattgaagcctcagaatagtcctaattttgtagtaaggtaactgaggcacagagaggcaaaatttgactctggccacaaagctgataagtggaggaaactgaacctagttcttagagctccaagtttacagtctttccaatgttccattccatttctacagttagactggtcatggctacctaaaaactttgaaggtggagcttctaggtcaaaaaggatgtagtctaatggcaataaactggggacacttagcacagagttttgttcagattcttctctgtgaccccttgtcttcagagataagaacattcctttcttcagggcacctctccaatgagggtcttctaacctgccgcaaggacaaacagggagcgaacagtcagaaagaccttcctacttctgttaccttctcacattcctttagctgaaaatattcactatgccaaggtgccatattttggggaagcatgtcctgaactccatcacttttatctttaaaatgcagattgcattaaattgcctttaatattcctagtgaaattagaaaacttggggataagaacaatcccaacacctggtcctgggcttgactgacctttatctctgtcttcacaagctctgaaggagtaagtgcccacagagcaggacacgccggaaagggacactttgagtttcttattccgtgccccatacagcctcccactgcttcaagctagacagaggaggactctttctccctctagagacaaacccaaggcctggaaacaaagcaaacagaatggccgccttagctccctctcccctgaagcctacactagactctaagattagagcactccaataccaagtaagtacaggtacctgtctcgagagagcccaccaacctgggagaaagggtggtttccccaaatgcttagtgcatgacagtcctcggctgttcgctctgcactttctaccgtggggcagctccagagatcacctgacttgccagttcccagaaggcagagtcagcaaagggccttctcaggagacccaagtggcagtgagacaggaaaatagggtctgcaggcagggaacataaggctgattcacacttgaggtatgacaggggctatcctctccatagggcatacgccaagtaaatgacttcataactttacttcatcctcttcatttacatagggcatacacccagtaaccaatggaaacctctagaggctatttagacccccaaaaattctgtaacggggcccttgagcccctatgctcgggcccactcccaccctgtggagtgtactttcattttcaataaatctctgcttttgttgcttcattctttccttgctttgtttgcgcattttgtccagttcttcaagatgccaagaacataggcaccctctaccagtaacagcagtaccttcttcttcaagggaaaacctagccttatgggataaagagacagacagctattgaccttgaaatggggcagtgtagataatgcatagtccattaaatatcttcaaacttgaccgacgcctggcagtctcttcctggatttaagtgtaggagtgtgaggaggagccataaactcttcttgtgggtttcataatttcctactctcctcaaatgaaccagagacaaggacataacctgatggtcgctctgcgagatgttgctgagttctttccttgctcaagaaaacagaatatgtcatgatcaagccacatcaatgatgaatatgcacatcttgcctgatggcagactgctacttaaaatgctggaagccctacccctgagaaccaggccccaagtattatgttggcgcagaagtaattgcagtttttgccattgaaagtaatggcgaaaatcgctattacttttgcaccaacctaatacattcattgctaccgagaatctacatgccccggatgttcagggttttttgtgcctctttaattctgatattttttattttatcccttctttgagatgtcctttactgaagcaaatagggatttattattacctggcaatctcccttaggctgtttcgttcaggcttggttgttcaaggcaactgacaaaaagaaatttggggaacaaagccattttgctttgttgggtcacctttaatagcttgaaaaggtccagaacttctttacttagcagaatctcctgatgactttgctaagtgaggagcgagatgcaggttccctttaaaagcctgacatctttccacctttgttcatacgcaaagtgttttctcaaagtgaggccttctgcctttgcacatcccccactctaatgagacccgtgctgccgccaaatcacattcggagaccgttaatgcagcaggagctggcggaggtctcttctccatggaagcaagcccgctcacccaggtgaagagcaacagcactaatgagtaccaggagatgatcttaaaacagaatccttcgctggccccgtgctcgcctgtaaggtcctcattctttagtcttctttctgtccctacaacttgggaaaaaaatttacctcgtccctgtctttataaattgggagggatatctcagactcttgactttaattcagataattaatgtactgagcttttaattgagtgagtgggagggaaggagatgtgttttgccagcttttaaatgtagcggaaacataaacgccaggtttcaggattaaaatgaatgatcagtcaaccaacattcatcccgtgcctggtatgtatgcaccattcagctaggcagcgctggggatatcacagggcaggcatggcacctgacacgtgtcttcagggggatgcagtcagtcaagtagaataggtaagatgtatacccgtatcactacagttcaagatagaaagtgttccaataaataaataaagcccctaatttcagaggacagattctttggaatatcttttctctattctcactgcttgtaattcagaccaccattctctctccctaggattatagcagtagtgacgtgactagtttctggccctcaatgaacacctgtgatgtgctgggcacataaaacaattgtcacgcgtgtccatgtgaagagaccaccaaaccaataggctttatgtgagcaataaagctttttaatcacctgggtgcaggcgggctgagtccaaaaagagagtcaaggaaggcagatggggtggggccgttttacaggatttgggtgggtaatggaaaatcacagtcaaagggggttgttctctggtgggcaggggcgggggtcacaaggtgctcagtgggggagcttctgagtcaggagaaggaatttcacaaggtaatgtcatcagttaaggcaggaacaggccattttcacttcttttgtgattcttcagttacttcaggccatctggatgtatacgtgcaggtcacaggggatatgatggattagcttgggctcagaggcctgacaacaatgaattaagagaaatgggccaaggataagaaggagtattaaaaggaaactgttgggaactagagcacacacaggcttctgtctgaatagggcagacgctttggctacagttaattattgccaagcagggtaggggaacctgagccactaggtacacattttttttttttaatacaagtctaattattttttaaatcttttaaacactgcataagccatacagagcattcagtgtgcctgagctggcctggcacctgccatgtggcagcctgtggcatatactacaccaaggtgaatacactaaggctgaggtgactcagagaatctttgtggaagggggagtatttgatacacgtttggaagaatgggtgtagtctggaaaatggctttccaagtaaatgagagagtgtgaacattaggtatggacctagggactttgaggttgtggtcagaaaaagacaaggactcaggcggctggagaccagggtatgagcaaatgtcagagggcatgccatggagcctcaggccagaagggtaagtggaggccagatacccgagtgacctcaagtgctggtcctttacccactcgaaacctcactctgcttgtctgtacagtgagggtggtgacacctacctcccagagttgttggaaggagctggtgggattatgcgtagcgaatgcttggtggtgtatctagcattgatacagagcattgggtcaccctgctgtttaataaaatttaggcttaggcttcattctcctcacactgtggcactagtgaagggcttcttcttttgtttttcttttttaaagtctatattttcacttatatagggaaactaaacattcagaaatgtacaaagaaggaaataacaatcatctacgttctcatcacccagaattaaccaaggttaacatcttgggagatttgtattggcatccagtcttttatttttaagttattcttgattttgcaaaaacaagaacaaatccatcacaaaaacttgttaaaacacagcaaagtacaaaaatgaaagcatttaagcctaccatcattacattaggtgcaaatcatttcagacagttttatgtgcatcatatataaaaggatgactgcttcctatagggttatgggattgccataaggattaaataaggtactccaggtgaagcattgaggtagcacaggcctggcatacagtgctcaataaatgttgggtcatcatagtcagcaaatgagcaggtacagctctgcaacactacaatttctgtatcatgtttcacaaaagtctaatgttcaagttggatccacctttcaagatctttccctacccaattgcaaagaaatgtacaacaactctttgcgatgagctgggaagggggagatgatcaggatccttgggaatttcacgagctgataaaaaagagctccagagacagaggagatcacgaaatgtggcctcttttcttcttcccttccctctctcaccctcccctttcttctctccccctcctgcactcctgtcctgttgtggtttaacactcagccactgcaatgctcagaaaatgcttacaaagtcctcctagttacatttaagaccccctttctcttcctgaggaagatacacactgatcccagagttaatgagtattgattgtgacatctgtcttcaccagtggcccaagaaaggggtgcacatgctggctgcctatggttaacagctcagttgaagacaggaagcaaattagctgttagacggtggtcctttgcacctgaaattcattatagctttaaactcattttgaaaatgtgtcttgtaactctctgaaccaggagtaaaagcccgggccacttggtgagaaacctgttttgcttagtgattaaaaaatctggcactgcctcattctttgagctttgcagaaatttgcaatagcttctttttaccataaagcaggtgtgaggcgaagactttgtgtgtgtttatgatcattatgttgtattaaagagtcgtgttgagttccagaatgagaacaagaatgctgcatattcctctacctgcaaagcaattaaattattgtctgacatgtttataactccagaaccagtaatcagcttttagtctgaatagaggacatggcgttataacccagtgctttgctgagaggttcatatttagcatttgcatttgataatttaatttaaataataccgagcaagcacagttacacttcttggcaattgtcgaagtaacagaaaagaatgcaaagcacaggctgttttttgtaaacaatttttgtattcctgaatggttttcacttccttgatatgaacctctgctgctcttgtcgaatagactagaaaatggtaggagcctgtaaagtctcaagtattatgtctctctttgttccctttctcctcttcccacaatatctgagcaatctccaaatttccatgtgattgtgaaaggcctgcagtgaaccattttaaaaaatcgcccccacaagggacttttttcttgcaagacaccgttatgtattatagatcaattttctgataagagtctgtttcagagaatatttggtaatttcagcaaaggtaagtacttgccacaggaatagtgaatcccaagttaatgcccaataatatcaccaactaaatgaaataaatggaagaaagagtctcttctcttccctatccccctccaaaataaagtttatgggatgatttcaggatgttcatttctaggactatctagctatcatatttctttacccaatttatttacttcaaggcacaggtgccagctggtttccagacacgttgctgtttccactttctcccctccccttttcctctacttctcatgaacaaaatatccacagatttcttccatccctgttaggggagtttcagggccttccccatcacaggccttgagaaaccaaacgtccgtgccctaaggtatttttttctctgttgcgcttggctttatagtcttgcccagtaggacctgcataagctttctcaggcaccacatcttgcttagaactcagggaggtcaaacaaagtctttcatttttactgtgcctcccacttcccaagacctgcccagtcacccaaaatgctgattggttgcaaatatcacatatgtaagtctatgtacgccttcaaagaaggtttattctactaagaatggtattttctgagagatgttgtttaaaactgagttaaaaaaatatttaagtagatttcctagtgtttctagaatcttccaaagggcaggaaagggagtaatcagtggagaagtgcagcttccctttggtttgtttagattcagcatgtctgggcatgcacaaggctttctgagagttcaccaacgtggctggaggttagcagaggctaccctcccaatcatattttaaatacgtccaatgccaactgagatgactctttcctctgaagaatagcccttactctctgccagccacagtgtttgttagatatgtttcatctgaaatctctttcgaaccatcctaaaaaccacagagtcaaacaactgtggacttcatcaatccattttccagatgctgaaactgaaaactgaagggagctaacctgcccatggtcatcctgttgggaaccaagttactaagatctaatgcgggtcttcccaaacccaaagcctatactgtttgcacagcctcacaggctccagccgctacttctttgtgtacattagcaagcgttctgtcagtgtataatgtgctagctacatctgtggccttggcctttgatcaatattgaccacccctgaattcttgtgaatcctggtatatctgattatgaagagttgtaggtacccaagcagcaatgatgcagccatacacagtgacttgcacatttgaataactcacagaaccatagcattcatgtgtctgagaggaaactcttggtataatcttctttcctcctgctatcttgctcttctagtgagaatttacctaaatcgtatagcactatactagagtttaccttagttcatgttaagatctatctaccgttagtgattaagctgaggaaggagaggtgataaaacattgctgggcggcgtaggtgcaaccccttctgctttagtatttttctgagctgaaatactgtcttagatattctagatgaaatactaccagccaaaaaggggacatgaagaaggtttttggtttaggaggttatggttctggcatgtttcccagtagggtggctctgagaaatggagccatggtgttgaagaggaaatcaccaaaacacaaatgggcagcctctttgggaccctaagcagtgctccaggcaagttgaatatactgttcttgtggtagtaaatgttcaggttcttcacaggaatgaggctgataaaatcctgtgaacatggatacctcatcacagcaaatgtaacgattttcatttgttttaattctatgattagttctgttaataaaaatgtctatttaagctatttaagacacccactgaaatgctatcatattaatttcacggaaaaaatccaacggaactatattagtttttcccccatgaaggtgacattatggacttttaatggcactgtcagcaataatggtttttattgacctaattattaaatgaattaaaatctgtctcaatgccttgacaattatataatatcggcatggaggagagagccacggtgggttactgtgtgatgaaacaggagaaacccagaactacatcctccttacatgcattggttcatccaaagaaatgacaaataatactctagtttcattagatgtatttgcctatcactatttttaaaatttgttaagaccaggcacagtggctcaaacctgtaatcccaacattttgggaggccaaggtggtcggatcacatgaagtcaggagtttgagaccagcctggccaacatagtaaaaccccatctctactaaaaatacaaaaattagccaggcatggtggtgggcactcgtaatctgagctatttgggaagctgaggcatgagaattgcttgaacccaggaggcggaggttacagtgagtagagattgtgccactgcactccagcttgggctacagagcaagactctgtctcaaaaaaaaaaaaaaattgtaatatcaaaataatactttgtggtgacttataatattaaacatggaaaacttctctgttttccttgtctgtcttacacttttctcttttgatgatttccaaaaatagtgttagaactttagcaatgatgttaaatatatgatgaaacctatgaagttttctaattagtttttaatataaaagtaatatcaggggaataaatttttagagtgcaaaggaaggagagtaaaatttcaaatctcacttttccagaagtaccattgaaagtttgaggaagctatttgtaaattattgattttgggcttctattaatatatgactttatttttggcacagatagcaaatatgtgacacccacgcctctaattccctctcccaagtcagacatcattaagggattgctgcaccctttgtcactgagaatactgcagtcttggaattcatctcagggctgtgcttcagaaaaacccagaaaaacccacccagtgtgaactgacatagaaattgaaccctcctttgcatccctggtgattactcacagttataaaagcatcttcatagacacatacacatgaatctcatttgctcatcaaagaaatgctgtgagagaaggaggacgaggattatcagttctattttagcagacagaaaaacaagacagagtaaggaagtgaatcagagagctgcagtggtttatggagtcacaaggaaggcctctttgaagactgacattcgaggagagacccaacagaagaagaacgtacatgaaaaacctggaaacagagtgtcacaggcaaaggaggagctggtgtaaggaccttaaagaggaaaggaagcccttgtgaccaagggagagatagagggtctgggggtgttgctagagacccgcaaatgggtctgggtggcccagagccagggtaagggatttgcatttcattctcattgtactgggcaccattagaggagatgaaaggaatgacctaacgccatatgtgttggacacaggctagacataccgcatcttgcctcaacaatatctacccaatcagtagacacagttttgtcttgaaagcaaattagggagaatcatgtcttgctgcaggtgcacacttctattctgatgaactcagaaggtggcattccctgtctccacctctttcctatagccatggaaacctatcccaagaccagggataaaaccacacagcagggcgcactcagtcgagttctggtagagacaaaagcaaggaaaagttcattgtgtgttccatcaacgctgagcagcacaggacttcccgcaaggagaccggtacataagcctgtctgaactaataaggggaggcatcccctggcagccactttttccaatccgatggagctctgtgctgcacagcggggcacctcttaccttaatcctgaattttttactttttatttattaattgtattttttgttttttgagaccgggttttgctctgttgcccaggctggagtacagtggtgcaatcatagctcaccgcagcctcaaactcctgggctcaagtgatgatcctctcacctcagtctcctgagtagctgggactataggcacccaccaccgtgcccagctcatttttgtattttttggtagagatgaggttttgccatgttgcctaggctgtcttacctaaatccttatcacacaattaaacttaccctcactcttctcttttggtttgctttaatccctgtatcctttatgaatacagccttattttatataaaaataagaagaaaaaatgttatggtattttttttttttcgagacagggtcttgctctgtcacccaggctggagtgcaatggcacaatctcggctcactgcagcctctgcctccagggttcaagcagttctcctgcctcagcctccctagtagctgggactacaggcacccaccaatggccagctaatttttatatttttaatagagacggggtttcaccatgttggccaggctggtctcgaactcctgacctcaagtaatccgcatgcctcagcctcccacggtgctgggattacaggcatgagccactggccagtattatttttaatactgctaatgactgcctgagaacttactgtatgctagaccccatgctacatgctttgcattgcattctcttcatcctttgaggtaagtaagtaagttccattattatgccactttacaggtgaggaaactgagccatggtaaagttaactcgtgcttatctaagatcatactgctaacaagggtagggtccaggaggtttaactgcagagtctatacgcttaaccaaaaaaaggccttccctcatactgtcaaatggaacaaatgtgactgaactttggaggaaactaggcctagctttgagagctgtctcagtttcttcagctgtagattggagcttatgatggctctgacctcaaaggatttggtgagatttaatgagatactataaataaaatgcatggagagtgcttagcacacaggaagtgctgttacaatatcacttgggctctgggcctcagtgccctgatgtatgacatggaagataacagcagctgtctccgaggaccactgaggggcttaaaagaggcgatacatataaaggtgcatataaagcgcctgcacagggcctgatgttttgccaggtggtggctacttttgttaatttaagaatgagtgatctcttgaatttgtggcctccatagcaaatgaaaagtagcaatggaggaaaacccactggtatctcctctgtaagtttcatctctgaaacaggaattagcaccattgttaataacatgcgagtatctgaatttgagttgtggtaatgttcgtgtcctggtgcgttttcaattggtgccatttcagaaggaggcatttgtgctataatggaaagcttcagtgcaaaacgtctgaaagaaagtctgatgtctgttgtttcgtttaagtcaagttctgacaacggtacgttctagagaattgcagatgttctcagatcgtgtgatatttctctaaaaaccatgtctgatgtttatccgctggagcaatctggtatgatgaggaggataaggctctttttttcatggtttaaaaaaacccaaatgtctggctaagcttgtgagaaatagcctgagtatgtggcagtgagattaatggattctcacgccgtgtcccatggaaaaatgctccccaagtgttcctgtgtgaaatactgtacctttgtcacttttggggatacatgggccgggccttagctaaaggcattgctaagcctcagtgaggagaaaatgacaacccctatcctcactgggccagctctcaagtgccagatctttttccctccaaagccaaactcccatcaatgaaaaataaagacagaatgatttcatctttcaaatgaggcaatgaggcaagcccttcactctgtaggttttaaaagatttaaatcaactctttggtttaaagtcctgtcccctcacttgaccaaagtcatgtaaatcctgcatttccttacattgtcttcggaccatgcttggaaggaaattttcattgaattctcgcaaggactgagcttctggggaggcagtgcgagaggggaagagggggaaggtttgagtttgatgagcactggtctggaagccaggaggctcaagtctctttaccagtggccatgtgaccttgggcaaggctggctcctcttgtcatctttggtaaaacaagggacctggacaaaggttgccttcatcacgaacacagtgtcaattctgactttgtccttcctctcttgagaagacgatctacactttctttctggcctgtggtaaggctgtttcattagttggcctgaaaaacaggctgcttcattatttggcctgaaaatttccctactgcatttttaatgacctacaataggtagtcattaatagtagcttcttacctggagtcctcagacagggtctgaaattagatgcaaaaacttgagtgtaggtgaatttttaaggggtcagggggaaggctttgcaattttcatttatgcattcagtgaatatcaaacacctattctctgccaggcacagagctaagcaaggtaaagaaaatgatgatctgggcagatacactccctgacctcccagagcctggaaaaaggaataaacaagcagtcacagtgcaggcggatggaggtacagtggggtaaggtggaacctgtgaggtgctattggagcttcagagaggagcacatcacccatacttcatcagattttcaaggaggttcatgacccccccccccaaaaaataaggacctccaaactaaaggaacaggaatttgatatgatggttgggtgaacaacatatatagaaataatgatagatggacaaatatgtttgagatgttcattcctacctaatgaagcatccaacacaaaattggatataaaagcttgaaattatcatgattgttgtcaccacaatgacagttaatatacattgagctcttactatgtactagattcttgttaagcatttaacatctgtaatttcctttaattgtcatcaaatctttgtgaggcagtatagtcctgttttacacatgaaaacactagggctcatagacgttatctgttcagggcctgtcagtccaccccaccaccccagaaatgtggcaaatctaggatttaaacccaggtctaggtgattcctaagcttctcattagtacagattttcacaattttcagatcacagtgagggtgtacttggaaccctcaccttccaaatagattggaaagtcatgtttcttcaattgttttgccagacaggaccaaactttaggttaaaaaatcaaaattttgcatcatctgtttctttctatagtagaagacattctcttctaggtagactttgagaggccctcaattaccagttgaaatggagacggtttaatatacctgttctgaggcccaaaaccctccatggggttcaaaggagaaacaaagctctaagggacttatgaacaatttaacatttccaaagcacctaggattagtcattccatttgacacagaataccatagccatgattaaaaccaagacatagactaccatagccatgattaaaaccaagacatagactaccatagccatgattaaaaccaagacatagactaccatagccatgattaaaaccaggcatgggaaatccattctggggctgcacagctcccactgtcttattcttagctgccgtaagctactccttgactggctgaaggccattttctctcttctggttgaccttggcgcccctactttctgggtgtctttatgaggtcttccttcttctatgagagtttgatccaaaagatacatagcccttattgacagggtcatccccaaaatacctggccttgtggaaatgtccttgccctagaattgcaccgtttttttaattcaacaagcctttactaaggacaaggcctatactcagcattgggaatacagaaatgaatcacccacatttcatggagtacatgctcaatagactgcaacatagagaaattagagaccctttgcaagttatagaaacccaactcaacctgccttaagagccttaagagaatgagaacgagtttattagctcatgtaactgaaaagtctaatagtattgttgattcaggcgcggctggatccaggggcacaagcaatgtcattaggggctttgtgtctctctgcttctctcaggcaacctctcctcagggaaggtaatgcgaacaccagcagccggaggctcacatcctactagcttatggtagaaagattgtgggtttcccccaccccacccccgctgcttcagtaatgcctataaaaactttgcacagaccatgctggcccaagttaagctacaggatcattgctgagccaataaccatggccagaaggatagggttccctgagaggccagatctggattatgaacccatcccaaggccagttagaaatggagtcaaccccatccaaagcctgaggaacaggataattacccacatgaaagagtagttccgtgaagagaaggaagcaaaagaaacaacacacaacaggcctaagtacgaagcattaatggagcccaggcaaagtcagggagaactcagaaaggcttcccaaagatgctgacatttcaccagagtcctgaagggtgaatagaagttcaacaatagtacaggaatgtgacctggagttttgtcctgctttactaatgctccaataggaatgacctcagaaaataatattcattcattcattaaaaaaaagtttacttagcacctaccaaccatatagcagggactatgttagtgctgggactgtgatgatgaacaagacaggtagtgatttggctctcatagatattacagtgttggggagacacatattaaataattgcacaaatgttaaaaaaaaattatccttttcctaagtgcgtaaaaagagaagagcattatagtagggttacagcacactgatgcctgtgtttcagttttcctaactataaaatggaaaaattcttgttttctcctcctacaatcaatcaatatcaataatgcaatgatgaagacagatgatttatacacacacacacacagagagagagagagagagagagaaagagagagagagagaagcaatgaacaccttgaaatagaaagtaaaagttagggaagctgctcttactataattagctggctggctcattgcatgccaccttaaaatgcctccttttcctactgtccaaatggttaatttgccctctacctcttagtggtcttgactcagtgcaccgtgtccttaaaccattgtatctatgctaagtacaaaatgctatcacctgccttttattatttcctcctatgaagcaattggggttcaagaaaatgctttttggtatggaagcaaaggaaatctggaaatgctgcttttaaactactggccctattattgaacaatttacagtaattatactattttgtacccaatcttgtcacaaaaagttcccattttagaatctgctcttacaggcatttccaggggagaggaatttcgctgctcatttatacactcctgaaaatagcagtggataacagagatgagactacaactgcaaatggcactgctgtgatgaagtggcatttacaatgggaagctttgggagtgatgggagaggagtgccatgtttgtgcagagtcacttttatgtggtggcttcgattctttattcaatggaagccagatgcttacagttaacatttttaatgggttcactttcccaggtagctcataaaatcccactaataaatcaaagggcccttcttaacagaatttcaaaggatgctagaatgtcactgatgtattaatgagttaggggccctgaaaactagattcataatttttctaaagtgtccactccctttcctccctataatgcatcccctaaaaagactagaaaaagaattcagacataaatgcctcaatgtcacaggctagccatgtgttttccacaagacaaaacgagttaccaagaggaaaattcctgatttaaaagataccatttcaattctattagaattttttaaaaataaaaggcaatgagttaagtgagaataagatgtaaaccttcctgcaatatttgattgctaatgaacagaaagtattaatcttagcaacggagaagagaaaaatgcatagtgtttttcattaaatcaactaaatgattaaatgagttagtcagtagaaaccattttaattttctgaacgtgaaatgtgcagcttataacaaataaattcaaagcacctttctaagcaagttttgaccataaaaaatgtgggttataaagatgtttggtattttcttcttcatagatagtcaatattttaaatgcagtgacattaattgtgcagaatgaaatgcccctactatctgggcttaaaaaagttggcatccagtgcaaagtccctaatggatcttcagcactattacaaaatgatagattgttgtcatagtcattttagcagctttcagagctgttatatttttaattaaattggctgtgaattttttaagtagcaaaggttgataaactagcacgcagtgcgatatcactattcttcttagcggggctgtcatagtggtacatttatgtgcataatcttcttaacattcataagtctctttggtctcaggcattgatctgcaagattacttgctgtttggagatggggtaaaaaaaaaaaaaaaaaaaaaaaaaaactatgaactcagcaaagaacgtggttctgagacattagtgggctgagaggagacctagcctcataaccccactgtaaattggcctaccatcttcctttcttgtacctcatcaataagagaacacagatgtgggtggcaggttaatgtgcaaattcttctaccaacaggttttgagaggttcctgtgagccaggccctgggctgggtgcagggacacaagggtgagtatagtggaagactaagacactgatccaactgaataaatagggaccaattcagagaagtactgtataggagagggccaatctagaatgaggatcgtagcctgcctttagccctgtttagggaaacctgcctggcccctaaccacaggaggcagggaagaaaatgtgttccaggcagaggaacagcatgtgcactggtgcaagggtggcacggagccagtctgaagacctaaaaggccttggggctggagcccagagagggagtgagatgacaggggaagtactttctgccctggatacagcatctgcatttccaggaagtgcttgggagttgactggccagccatagggatagctgtcaggatgattcaattgaggcaggatgttcaaatgattgcagttcactagaggagggcagcctcgccttgggtatgtgtgacttctactggccatgaaaaagtgaaaatcaaagcccaggagaaatgatgggagaggggaaaatgtggttaatagaatgacagaacgttagggcaggaagggtccttacacattgtgtcctttgctaccatcaatttgcagactagaaaggtgagccccagaagggccaatgtcacactttgattggcagtgagaaaccagcctactttgttcttaaaggagggcacttcctagaacactatgtcacttcctcagaacttctcattttcactctacggtaaaaagattcccttatttatccagcacatagatggtagctaggaagggtttgtagaaaacaagataacatagcaggtaagaacatggaggcagagccagagaggcctaggtttgaatcccaactgaaccgagtgaccttggcaggatacataatctctaaacctcagttttcacatttgtccaatgggactaatagtagtgcctacatcattgggttataaatattatgttatccttcttgcaaagtgcttcccttgattcctggcatgtagtaagtacctaatccatggtaactattatcatctcagaacaattgagctaatcaagagatccgtgaatgaattatcttgttccctttgtagaaaaagaaaatggcattttacttttcataaagagggagaagcctttgacgtgtgtgtgtgtgtgtgtgtgtgtgtgtgtgtgtgtgtgtgtgtgtgttttgccccttgtgcttctggtatgcatgagaaatttcacatttaggctactggctcttcatgaggacgtgacttcccattggttcatgtatcctgatagttatgggtacgtgaaaaccaacaaataatgcttaaaggccacagataatgaaagtttaaccacaactcaaagagaaaaatgctggctttagtttaacattatttgtcatggaaataattcaagatttagagtcatacagacctgggactaaatcctggcttggtcacttattatctgggagatattgagcatgttagttaacctttctgactctcagtttttcaacaccaaaatgaggaggataatatttatgatatagcatgttatgaggttcacctaaaagaaggcaaaatacctaacacatagtaaacacccaacaattttggcttttctagttatacagaccagccctctgataattcccattgaattcaccactgagaagggggtaggggtgcactgaatcccattcagttatgcagcctttgtttctaaggtagaaagtggatgtcattttcagcaatgcaaaaatgacctccacaccctcacataaagcatttgggtttggcaccttgatttcttcaatgaggtgttcgcagcagcagccacaggaacagctggagtattgagggaacctcacaagacagatgactacatggggagactgtattagtaaaaattgtgtgttgagtaaacatggcagttactttcaatggcataatctccatagtttccaacaagaggctgtgcaaattgcaaaggagggaaaagaatatctccgctttcctacattgaggttacagatgagccacagagcaaccatttgtatttgcaggcaatttccatcattctgcatgcatgctcaccctggcaacagttgaaagcattattccacattaccgtagtattttatcacgcatcgcacgtctgacacagttctttccctggcaagagagtgcttccggctaagtttcagattttgtcagtaggaaaaaggaattgttatgatccagaaatggctagggaaacataccttcaagtgctacaaatttgtaaaggtaaagctccaggtagaaagaaagaggagggacaagcaagcccatgtcttgccagcttctgtgtgttttttgcattagccagtgggggtcaaattctgacactttaagtggtgagggagatggaagctgcaccccaagtaattcacattattaactcttctgtctctgttgtccaggaggaggtgggtcagcatctttattggcacggattatctaggcatctcattctgcctttcacttttggtgtggcccagacctggctgaaaaggatgataagtttccctccttacccccatttcacccatcaagccaagatatatttacctggtgtcttgtttattctgccatgctgcatgtcagacactgcagaaacaacagtgaacacaacagacatgatctcagagctcacaggcgccatgacagatcctctaagcggggtgttgaaggtattagcggagcgcataggtggggcactgactcaaattttggcggggtgacatctgcatcaaactccaaagattgcatgagagattacaaggaacaatccaatgtctcctactcctgcccactccaccttcttagcctggctgaaggacgtctggcatatgagagcatgctgcaaatttaagtaactccttgtttcccaaataccaagcattaatcctggtatttgccatgtctagaaactactgctactactatttatgtttcttcaagtaaactttctttttctacctgaatacatgcactgaaaaaggaaagatgctgccaggtgtagtggctcacgcctgtaatcccagcactttgggaggccaaggtgggcggatcacttgaggtcaggagttcagcttggaattaccagcttggccgacatggtaaaaccccacgtctaccaaaaaatacaaaaattagctgggtatgatgatgcacgcctgtaaacccagctactcgggaggttgaggcaggagaattgcttaaaccctggaggcagaggttgcagtgagccaagatcgtgccactgcactccagcctgggagacagagtgagatactatctcaaaaaaaaaaaaaaaggcaagattgcatcactaatcacttctggaatgttatactggaaacatttataatatgccataaataggtgatatggttcggatatgtgtccccaccaaatctcatgtcgaattgtaatacctagtgttgaagggtagggcctggtgggaggtgattgggtcatgggggcagatttctcatgaatccccttgatgccatcctcgtgatagtgagttctcatgagatctggttgtttaaaagtgtgcggcaactcccctctctctctcttgttgctcgggccatgtgacctgtctgcttccactttgccttccaccatgattggaagcttcctgaggcctccccatgatgccagcatcatgcttcctgtacagcctgcagaactatgggccaactaaacctcttttctttataaattaccctgtctcgggtatttctttatagtagtgccagaacagactaatacaaaaggtaactgtaaaagtaagtacaatcaaaaataaaatagtattattaaatgccaactagattctatgttggagcctgaggcttgttcttttctaacacaagaaggttgatcaataagccttggtgcaggaaggacaaaggagcaccgaactgactttctctaggagagagcacaaggaagaaaaaggatgttgaacctaaagaatcactatgtgattcaacattttttaaggtcgtgactgcgttctacgtaaagccaccttctgtgcctacctacacagtggtggttagtgtcccacactctgggaggaaccaggcaagactggtccagtggagttggaccacacagttgtaagtaatgaaataacaaaggcaatgtatggctttctaggccttgttaaggagttgggattttatccgaaaagaatggaaagccagggaagctagcagatggctgactagcaccctctgactagcaccgtctgatttgcatttcaaaaagaccactcaccttcagtgagagaatggatactgagaaacaaggctggtagaaggtagagaataggctcttgggagaatccaggaggaagaaaatagtggcaagacctagaagaatggctgcagggagggagagaagaagaatctgttaaatctcttgattgactggatgagggatatcataggtgctcaaaaatgttttctgagtgatatgactcacagacctttaccctagaaagagcaggtcggtccaatcatttttatatcattttttggccaagaatcctgaagcgttgcacctgtgctaattgaaaagtacaaatagtcaatatcatctttcaactcggtccccactctcctccccagcttcccttctgacttcctatttaaggtttctagttcattcacatgactcagaaataatgtctgcaaaccagggagaggtgacaatgatgtagtctcctgtggttccttacaggaaccaaagcgtcagggaggtttcagtttcccccatcactttccacttgtcccaagacattggtttttcactggtggggtgtgggggttgtggcaaatcagctcccccagaggatatttggcaacgtgtggagatgtttgtggatggggaggtgtgtgctcaccacatcaagtgggtggagaccaaggatgctgccaaacaccctacaatgcacaggaccacctctctcaactaagaattatctgacccaaaacctcaatagagactgaggttgagaaaccctgtcagaaagatggaaatgtcagaaagtgcctggtgatggcagagagagagggctgtggtagggcaagtgcttctattgggacactattatttgcttgttttgtttcgttttgttttttgtgagatcaagtctcgctctgtcaccaggctggagtgcagtggcatgatttggtctcactgcaacctacacctccggagttcaagcgattctcctgcctcagcctcccgagtagctgagactacaggcatgcgccaccacccccagctaatttttgtatttttagcagagaaggggcttcaccatgttggccaggatggtctcgatctcttgacctcgtgatcttcccgccttggcctcccaaagtgctgggattacaggcatgagccactgtgcccagctattatttgcttttaataacctgtgtactattagaggtttgtgtgagttgtgggccaggaggatggaaacaaattcctctgggtattctgggatcagagtcagagccaggcagccaatcagaagaggcagcagccccagactggacccctactccccagacacctagggatttgctaaatagcagagactttgaggtgacttctgtggggagtcaaggtatatctgcaagggcaggtcactagcaccatggtaccacagcaagtgtgttgaaattccagcaatcttcctgctgtcttggctagtttccaagcctgcccagaaaacaagcatctctgtttttagaagatggtagtgatgattactttttcctgggggaaaaaaaaatgccagaaagataaatactttgtaaatcactgcatgcctcctgcctgcaagcttggagtctgtttgtgagacatttatctccttgtgtactcaccccccaaaattatcatttaattaataaaactaatagcctgaggtatgctgatcaataagaaatagaatggacgaaactgaatcggatgcatcatggtattgaactgtctgcagaaagctatgagcccttcctcttaaatgaacgtgcttccagtccactgagatactgagagagcggggctgaggtgttcctgctgcatttgggaagttagagaaatggcatgtgcagatatcctgttctgattcatgagtgagatgagcactgagtttctctttatttaatggatgtagaggctgtggatggaaatgagttgtactttcatgtcaactggcagctctgttttcaacttttgtggacaaaaataactctatctttattacaggcacacaacaacccagtagttaactacaaaatccaaaattcaagggaaaaaaaactctgattagacaaaattgatggccaggcgcagtagctcatgactgtaatcctagcactttgggaggccgaggcgggtggatcacctgaaggtcaggagtttgaaatataaattgagagattttcatatacttctttaggaatcagacagatctggtagataagtcaggttatgtaacaagtcaacttcaaaggtctgttcttcactataaattggaagtctctgtctctgtccattgctcctcttcacattttctgagtgttcctccctgagacatctctgagaggtctcctaaaagctagattttagacaaatgcaaatctagagcatatgtcatgatagcaaagggctcctacttggcttgagcaccagagtctcagtgacggcttcaacactgctatcataactttagaagcaaatggcaacttgccaaggttaccccatcccgtaggctgcatcttttctctagggcctaggacacaaggaagcactaagctaatcttcatctgggaccaggtagagataaaaaaatgtcgtggtttcaatacccagcaaatgcatccaggctgacattggtaattaatgttgcacaatgaaaatatcactaaaatgcattagcaggatgaaatccataacttttgccatctctgggaccactgggaatccttcctttgtgaactcttgggccagggattatcctttctttgaattatagtgaaatctgtcttaagtgatcatttagggaccatccaaaattcgtaacttggtagaagttgaactttagctaaaggtcaaacaaaattctcctggaagccttaggagttgcttaaaggtgaaataaaaaattgaaatgaaaatggacttaatccctggtttatgaaccgagtagcacagctaagaaagttaagggaggcactcacctcacagtgcactttgacttatctttctgaaatgcctcatccgtctgtcaagtgccatagcctttctggcttattaatcatgcacttagcaatgctcttatttgctaaggatacccatatgttttgaagacctttggctgtgcgcttgggacccatgacaggggtgatgttacaggtcattctaggtcaggccttgctcacagtgcagggaatgcagcccaccaatgccttcatgatcctacatgcctttttctaagggaaattggcttaaccaacattagcattggttcagtgtaaggaggactttctttaaggtagtttataatacaattttatttgtattatattctagtttataatacaaatgattatatttatattatatcatagaggcctagcatagaaaacaaaatagatatataatttatcttctaatcctctctgaagcacttagaggagaatttgtagccatcttgaggtatctgtgttttagatcaagctgctataagagaatataaactaaacgggttaaacagaaacatttatttctcatggctctggaggctggaagtccaatatcagggcgctaacatggtcggggtgttggttaggaccctgcttctggttcaccttcttgaggtatcctcacatggtggagagaaagagctctggtccttcatgtccttataagggcacaaatccatcctggggctccaccttcatgacctcatctaaccctaatcacctctgcgaaggccctactaacaaatatcttaactggattgtggtgttaatgaattttggggaagtggtgggggcacacacattcagtccataccaccctggaactccagggattaaagctgagaagtcagagtggaagaaggtagagccagtgtgctctcctgattcactcctgtacatagagaaggaaccagacacatggaatgcaaattccagttgcaacacattttgtagcttggactgttcactgtaatccactgacattctacttcttcatctgtaacaagaacaaagcaatcctaataccaatcactatcatttattgggcccgttacatatcaaaccctaagctgagctggaactttacctacagtgtgtcttggtgagttctcaccttagcatttcaatgccagtgatggtgtctccatttgaggagataagagtgtctatgaaagattgaccaaaaatccctacttgtcagggatcctgagaaaatccagcgacatggcaggagacagccacacacagggacccatagatagtgtccatttctatgggaagaggggtaaaatggactttcgtggaactactatgaggcaggctatgcttgtggctttcacccaccttctgcctagcagttgtttcaggaaagtccattttactccttttcccaaagagatggatgttacctatgtgtccgtgtggtcatgcactttagaatccttctcctctcatgggatgggagtttccttacaatttgtttatccctcatgtatttatcgaacagtgctaagtgctgggagcatggcaaggcactgaactggctctgttgtctactgcatttcaagtcaaaatggaggtgaaggaaaaagaggtacaggattggtcccatggggagagacactgacttgaggatttcctgataacctcgtatgcccggatcagtgtatcaaggccttttattgttctgtattactgattactacatatttgggtagtgtaacttagcttataagaagaaactggtgttttgaaaaaatgatgttttcatgaatggaaggcatacataccctttatgcctgcctcatgtaactaaagccttatttatgttaatggcaaatggagctaatgtagcacacaggataaatcatctcagctcagaattctaattgaaggctccctggaaaccaggcagacaaccaccacaaaggcaacccatggacaaagcccaggaatggcttatgtacgttaaggtttgattctgttggcttcagcttcctggaacctgcctctcggtacctgtccagaacaactctctctcttcccttaacaatatatacgtttctgatcacagtggtttccaaaagcacccctagagtctgagtggcacctaatgatggcatctctttctagaaagtctttatgtccaagctaatgagccaacaaatatatggccaatgtttcatggagtctgcaaacttggatgtgattttcttccctggctgaagtcagggtaatgccaagctattagcttaaacttaaatcagtacaagtaatcagtagtgcccattctcttcctttctaacagtggaataagggcaggtccaccatctggtataggcattagccactttgagttagtctttgtcaggttaagtatattcaaatccatgtaactgtgaggtttcttacaaaagctagttgattcatgggaaggagtaaaacaaaagactagcaggaaccccaggtcagcagctccaggtccactcactgttttctaagcgctttagaaaacttaaggtaaataataaatctatgtttttctccacaagacccttaaggttcttatgattcaaagcctgtttctctacatgacaagcctaaagtactccccagttctttagaagggacagaagtctctgtcccaggggttgtccagttgtggcccacatgccaagttggacctgctgcttgtctttgtaaataaagttttatcggaacacagccaagtctgtgtatgatctgtggctcctttttcactacagtggcagagtatttgtggcagagaccatatggcctgaagagccagaaatagttactctctggccctttacagtaaaacatttgcttacccctgctccatcctaaaatggggaaaaaagtttaaactacatgctacaatacaagctctatgaggccaggggccattttggttttgttcacctgtgtattaccagggcctcctgggttatggtcattcaacaaatggaagattttagacttcctcccactccctacaagtttgcgtcacttttactctttatccattcccctcccactgactataggattgaagtcccagctttatcatctgtcttcaatcttacctcctccattagcattttgtgagcttctaaataaatggtgctcttcattcagtagatacttattgatccctgataaagttccaggcactgggggatagaggggtgaacaaaccagatcagacccagaccgccaaagagattactctagtaggagagacagaaaaaaccaattaaacacacagacatctcagagagtgagaaggaaatgaaacttggtatgataaagaaagtatttatgcatatgaatttggttagaggggttagaaaaggcctcaccaaggaggtaacatttcaactgataactaaatgagaagctgtaagcccggggaaacctggggtagagagttttctaagcagagtgaatagtgattgcaaaagccatacatccaggatgagcatggcatgttcaggaaacagaagggaggccagtgtgcccggagcattggtgagcaggcagaggagttgtggttaaagaggcagacggtggcctagaggtcttcagggcctagcatgacattagagttagaaggtattaggcaagggaatgacatgatctgatttaacttttaaaagggtcactccctggctggattaaagagaggtaaaagtgcaagcaaaattatcacagtggtttatatcagagatgatatagtggaggtggagagaaataggccctttgggatgtgccttggaagcaggtagaatttgttcatggattgggtgcaaaggctcagaagctaagaagaattgctggtttttggctcgagtaaccagctggatgatagtgctatttactttacagactgaagtagggtaggagagttacaagtcaggggttttttttttatctttgggtgataaatataggtgcccactacacatgcgagaggaaagattagatgagccattaaacacgcatggttggaactcattaaacgttccaggctagaaacataaatgtgggagtcataggagatagtatttaaagccatggccttgaatgagaccacctggttgggaagagcagtagaataaagtaaaagagctgagaatcaagcgtgggccaccctgacatttcgaaggtggatatgggagaagggaaatcctttctaagcagacaaaggcaactacaagtgcacggggcctagacatggaccgtgcttggagttcttgaagaatgtgacgagagcacagtgagcatgggagacactggaacaaaatgaggtcagagaggagtttagattttattccatgcgtggtgggagggcatggaatgaacatggaacaggagttataggttaagaatcggagttctgaagtcaagaaacctgagcttgtcaataaattctgctacttactgggccaggtcacctgtttgtgccttaatttcctcatctgtaataaaaggatgatattaataccacaaagggctgttgtgaaatgaaataatacatgcaatgtgcttggatcagcgctgagcacacataagtaagtgctcaataaatgtcagctctgattattattgaaggggagaatcatttgatctggtttatgttcttaaatgatgctggactgtagggagtcaagagtagaagcaaggggtccatttaggaggctgctgtcatcagggggcacatggttcttttttcaaaccccgaggagtctctcccctttccctgctgtttcctggatggcccatcactgtctcactgttctctgagctagtggagccagtcaggcccttactttgcacatagcctgtgcaatgtcctgtattattatttatgtcacatctctgtgactgagtcatgggcctgtcttgccactttttgtctttggaccctgccctcaggtccctaatcagagtgtgatggtgagcacttgtagctgtcacctccactgaagagaacagcagcggtctgtctcagtaccctggaaatacgtgcaagccacagcccatttcagaggaaattctagttgtagaaccccggagcagaaaagctatgggactctggcctgagtgctgttagaaaccagccaggaggaaggcccattcccaaaggggagggcttccagcccatgctgccaggatgggcttctcagcaggaatacagttttcaggctcatttaactcctgtggacacatgtaaggagctgggcgggcaattcgaattcattttcgaggtgacagcgccaaactttggctgtgttagctcacagaaacattaatgggataatgtgctccatcatggagaatgagaatcaaaaaagactttaatggggcttcattatctccatctgtccatccatcacttcttctccatcgctcaccacttgagaaatgagaacacccccaaactaattagatttatcctaatctcctttctgtaccatccatcctctcagaggccatctgtgagtgtagagttcagacctttaagaattatgctaatcagtctttttctcatttaaagcgttcatctgatgaccacaatctgaaacttctggctgtgacaaaggggaaaccattctaagatttcctgctaatttcaaacaccctcatcctcacatacaggccacataagggccagtttctaagaaaagagctaaggatctttgagccaggtaacaagtttttttaaaagtgtgaggagaattttaattggtttataatatgagtgggagatgatttgctttcatttataaaatcaaaaaggaaggtgcctgagctgttaaactcgggaatggattgtgtgtttgagtggtgcgaccactgatgtataaaatgcacgggagaaccaattcactgaggtaggcacctagaggaaaattacttacgactagattttcagaccttctgcatctgccggagcctgtggcctggtcactacaggcgggtaaggaatgttaagcagatttctgtgcagagaggtcactccagcattgcagtggtttgaacctggtaggagaaagggcacttctgacacagcacattgccgttcattgcaaaccctaaacacccccaggacctgatcgggatgaatagaaatcatcagctctggaattagggggtccaaacacaaggctctgtggaatgattgatgctaaattaattgcttgttgaacaaataagcacatgagtcgaaactgggaattatagcccagagcagtgcttctcaaaccttaatgtgcctatgaatttcttggcgatcttgttaaaatagagtttttagttcagtcggtctgagatgaagcctaagctccggcatttttaacaagctcccaagtgatgctgatgtcgctggtctatagactacacttggtgtatcaagagaagttaagaatttgagtttggcaagcagatagaaccacattcaagtcctggccactttctggccgtggagccttaggaaaattacttccctcctctgcacttgattcatgcaacaaatatgtattgaatctcacgtgtgggctgtttaactgtgcttaaacagctggaacaagacagaaaatgatgccactctcctaggtctttaatttgatggggagacagacaggaaaaaaagataaagcaaaaatgtgtcattacaatttgtgataactgctagcagtaatattaatggtggctaacatttattgagaacctactatggatgaggcactatttaaggaagttcacatatatcaactcatttaatcttcataacaactctgttaggtatgtatgctcatcttctgttttcagatacaaacactgaggcacaggcaggtgaggtaacttgccgaacctcacacaccaaaaagtggtagagacgtgattttaagtcaatcggtccagttctggaatgaacgttcttgactggggtctgcatactttctctaaaaagggccagatggtaaatattttaagctcttcaggctattcagtttctgtcgcaaatccttagctctgctgctgtagcccaaaagcagccaaagacagtaaatgagtgagtgtgactgtgttccaataaaagcccctttaccaaatcaggcacctggccagatttgacccagtggctgtcgtctgccaatgcctgttcttgatcattatccaaaccagcgcatctcacgctgtagggcagccctgtccaaaataaacataatgggaaccacacatgtgactatcagttttatagtagccatattaaaaaaacagataaaattaattgtaatattttatttaatccaaaatatcataaatattatttcagtaggtaattaacatgaaataattattaatgagatattttacagtctttttcacagtgtctcctaaatctggtatgtactttacacctgcaatacctctcagttcagacaagccgttttacaggggcctggtagtcacatggggctgatggctaaggtcctgggcgaggcagctttaaagtattgaggaatcatttgggatggggccttatgttctgcttttctaacaagccgccaggtgatgttggtctgcagtccacacccgggacatcaagatgaagcctgcctccctgggaagaaaggaagaaagtgcaggaagatggcacaggagatgccaggcagtgtagggtgctccaggaaggcttcgtgaaaagagggaattaattacattggaaattgagacccagagggtgagaaggagctaactcagggaacagtgggaggaaaaaggtctaagcaggattttaaaaacattttcgattaagtgagtcaaagcatgcaaccacttaacattgagctcatgaggactcctagatttttgtgacaatacaaaggcagagaagatacgcagcttttcggaccctctagtgtctccctctccccatgctggattaggtaccccctttctgtgactcccacagttgcccatattttcctcatcacagcactttacaggccttttgcaggtgcctgcttattttccgggtcacccaccggggctgtgagctctgggcaggcagggcttgaagctttatcatggctctgctcccagcctgcttgtcagctagtgtgctttgactgtgtgagaatgaagacaggggccttacagaataagatttccactcaagatacaactgaattgtggaccccttgaaaaccttaaggtggaaactctcaaacaaaaaaattcagaggagggagatgagcattgtttgtttgaagtaggaaaaagaggacttgtggtacatatgagctttgtggtcacaggcaggtaagccacaagccggaaagcctacaaatgtgttcgttgtggcagtcaaagtaagtacatgtgaatgagctttgagagggggccctggccctacacttcctacatgaggctgctgcttttctccctcgatattcgctgaccaccacagggctgaatttggagttgtggatgcacaagctagttgcagttatatgtaacatcgagctcttctgggtggtctaaatctaaagccctgcaaaccccacacctccaaactccactaatgttcatagaaggctcacagggttcttttgccttctcgttaggataattttagacattttttgtggcattgcctctcctgaagaggcactatgcacagtggttacgagagctggccttggcaccagcctgcctgcatttgcatcccagccctgtgcctacctgggccagttccccgacctctctgtgctcagcttcctcatgtctgaaatggggatagtaacactgccaccctgataagatggtcatgaagattaatgaataaatgtaaagtgtttaaaacagtgtttgcacacagtcagtgttcactgttactgttctaaatggcttccacctgcattgctgcatatgttcctcccagcaatccttcagaaaaggtgaggcaaaccggggtgatttctgcctaatagcgtgggtgataaaagtgagattcaaggagatgaaacaacatgacccagagggagtgatagagctcaagtccaggtcttctaacttcaaattcacttaacattcactttatacttgctttatgtggggcctggaatgtagattagtgaatgtagatcaacgaagcacagcagagctccccctcagtggtggaggtgggtgtgctaacatggagatacaagccagtgactgtggagggggactgtcctggtcaaggttgtgcgagtgcatgttatgtgtttgttttagtgtgtcataaagttgctgggctccttggaggcagatgtatcctttgtgggctttaaagctgtgactcatggatccctgagggtgtacaaaccttctagaaatttcaagtaaagtgtatgcatttatgtgtgtgcacacatttttctagggaaaggagtcatacatagctttgatcagattctaaaaagtgctgacatgcctaaaaatgataagcactcccgttttagagcaacttagaggtaatttgtgaaatttttttatgatgagaagtctgtgtcttgagtgtgagcttgtgcacgttccccacagacatagagacactactagtctgaagaaggaaagtaattcttcttaggacaacccttcctgctgttcttccatgtcagcatttccagtgatttgctgggccaaggagtagctgccctttagtaattatttaattgcttagaactttatttccccatctgcaaagtgggaggcgatagcttctacttcacaacactctatggggggtttcaccctcaaacataccccaaatgtaataggccctcaatgaacctgacctcccttctttatctggtgtcaagctttccgttggatctattccaggagatattcttggagaattgtcttttttaaaaattattatcatattcccatgcttttcctcctggataaaggttgtatcttttccccagaatgattctcatttcctgtctttggcctttatagagcaggttcattctctcttgttctccttccatctattatgacatcttgggaaagcccacctgttcttccttctgcaattcgattcattgagttgtgctctgttatttgttgtcttttgtaattggtaagtggtatttttggtccattattgtcttatgtgagaagagaacaaaataatcccgctaccctcaccctaagaaaatttaaattccatgttgttgccctccaaaactagagtgcaggtatttcaagcagtcattttacgtgttaaataaaagaggcgatgtgcaaatgtgaaaacaggcaccatctaagcttgacttttaccttagaagcattacagtgttcatagtgcttcatccacttctgggatttgttgtattgattctttcagcctcctgggcagaagcagagtggcacaggcatgggtgaggtcaagggttgagcatgggagtccgaaaggcctgttgtggactccttccctgccacttgacagctgtgcagacctggacacatcacatagcttttctgagccttggcatctgtgaaacggggagtagtggtaaccagagtatatgtattagagggctagggctgccgtaatcaagtaccacaacctgggtgggtggcttaaacaatggaaatttgtcgttttacagttctggcaactacaagcccgaggtgaaggtgtcagcagagctgttcctcctgagggctctaagggagaatctgttcagtgtgtccacttcactgctgggagtttgctgatgatctttggcattccatggcttagagatccgtcaccccaatctttgccttcatcttcacttaatctctttgcgtgcatggcagctgctgggtccaaattttccctttgtataaggacaccagtcatattagattaaggctgaccctaatgcccttcttttaacctgattacctctacaaagaccctatttccaaaccaagttacattctgagacattgtggattagggcttcaacatatatttcaggaggatgcaattcaacctatagtaataactaattaccacatagggttgttaggacgattcgatgagatagtccacaaaaaagagctttttgcagtgcctggcacatggtaagccctaggtgaattgagccttattagtgtgggaacttatcatgccctcgttcaaccagaagctgacctttctcccttacaagtctgggcatttttctgtgttttgtttagttttgttttgcttttccttgtctctcatttttcatcaacccaaattgaaatggaaaaggcaatgcatagagcagttgaaacatggacaattctgtcatttgaccatcagaattccttctactgtcatttctcctcagtttgaatttatattagtaaaaacagatttgtgtgtgtaaaaatacacagaaacatactataacagttcaatccgtgtaaatcatttgagaagctgtcctaaatagcagaatgagtttatctgaggggaaattttgaaaccaaagtaattatcagatggccatttttttcaaaaaaaaaaaaaaatcaaaactagtccagtattgagaaaacacgttattggaatcaaataagctggcagcaaagtctgccgttccgtgtgtactgctatggtatccgaaacataattatcaagtttaagttaattagactaatgctcagaaaatctggcctggcagcttgcggtaagtaattatatatactgattaaaaatgtaatacgtggtgagcagaggcaaaggcaactccattcgacacagcctgtgcacatacataattaagaagccatgtagaagagtgcacacaatgagaaggaactttgtagagactagcaggcgtccagccaagccttctacagggtgggatgcaggttcccaccttacccaatggagggtgagcaggtgtcactgtggggccagcacagagagggcacgtgaccatgggttctcactgcttggcagatcacccaaaacacactccgagccacagcctggtgctccagcctgtcgtttctgtttcctctcaagtttccgcctcaaaagatgattagctgtgagacagccagaggtcagcttccttgttgatcttctatcctccgaaattatgaaattgacattaattatgggtcacaaatcagggtaggatgccaacctctgtgtgcaggcacagacataccttttatttgcccttctgctggcagagtggttttctttccagctttccttaaaagagggaaggatattgttatgtgggatccaggggcaaagacttgaggtactcaaggttaggctgtctaccctgattctttgtaagtaagtttattatgctgtaagagtttgattcagtaaatatagttacattttaagattggcgaaggccacagagaaatcttattttgttctggatctcttttacaatgtgtatctgttcctgcctcactagtatatcatatggtttacataacataattaaactcttatttgaggactgaggatgggtacaactatgtcatccttctgaatatctactgtgataagtttatctgggcaagaagtatttagtgagcctctcctatgtgcctagctttggttttataaggtcatggttaaggtattagattgaaccatatgacattgatgtctgggaagtcaaagaaaagattggctattgtgaaaagacatgattttgcccccaggaaacctatagagtggaagataaattagaaggcatgtacaataagtgtcctgaaatggaaccatcttggagggccacctaagtccagtgctggtggatcaggggaagaaatgccatccatgcagggagaacagtatgtgcaaagggctggtagtgagatacaaggcagttgtttaaagaataactcctactcacatgagatggaaacaggacaaagggttgagagatgcaggtaaaatggtaaaggcctgctactgtgccaagaaaaccatgtccaggaccagtaagtcaggaccagagcatttgatgtcaaaggattaggagatggagtcgaaattgcactggaccattacctagaatttctgctttttaaataagagaacccacgatataagctctgtcagttgtgatgttccaattcagagactagatgcaggccacccctgttatatttagttgagggacctttttagtagagcaacactgaggcttttagtccaacatggcagaagactcaagcaattcactgaatctccctgggcctttgttcccttctctataaaatggggataataatattgtgcctctacctaccctagagttcatcaaataacattctgtatgcaaaagagctttaagttaagttagagcctcaatttagtctgtattgcttagcaaatgctatgtattgttatatgaggagggggaatagacagaaagggagtgggaccctggagtcccaactgcctactagctatgagatcacatctctaagccttaacttcttcatctaaaaatggaaatgacagcaccatggatggggtaggtactcttatgaagagtaaatgagatcatgtttgtacttggcactgagcacattgccaggcagacagcaagcactcaatagagctccattaaaaataacaataacaacaacataattattccatccttaatgttgggctccagtcctttgatgtttccactttccgggagcaaaaatttccccaacattggaccgagggcatctctccttcagccaggaacaccactccatttttctttttgagaccaagtctcactctgttgcccaggctagagtgcaatgatacaatctcggctcactgcaacattcacctcccgggttcaagcaattctcctgcctcagcctcccgaataactgggattacaggtgtccaccaccccacctggctaatttttgcatttttagtagagatagggtgtcaccatgttggccaggctggtctcgaactcctgacctcaggtgatccacctgcctcagcctccgaaagtgctgggattacaggcgtgagccaccgcgcccggcccagctctccatttttcatagagtagtatttgttccttgtggtttatctgcattttggctgaaggatcgagtccagaatctgaccccctcctgttgtaagtagatgagttttctctccacccaaggcccaaataaccatttgcaatgtgaaagaacagttaatcggggttgttttgcatctgggatgccagaaaatcacttttttcttgatttaaaagaaatttaattttggcatctggtagacacagtctgataaccaattaggaactctcacagattttgaagcaataaattggctactaggctttactctaatgtcaatgaactggggtgagttattgccaaaatcaatcaaaaagagagaaaggagcaaaattgcttggaaattagtttacttctttcaacgtcttgtctgtgtttcctacccaaatagcaatcagtgtgctgtttcattccccaatgataggcagaagaaatggagacagagctgcaaagccttccaaacagccttcttggtgtgggaatcaacataaacaaaaggactaaagagattatgaaatgtggaaagcatgcgaaatgtatattactactgcggacatgtttattaaaatctgggcaagcattttgctgtgaaaataaaacataagagcacatttatggagaggagaacatttggatgactatctcacagacataaagctcttaaggcagagaagttttaattaagaacagcaacctgtgtgaagtgctatacccaaaatagatcctagtcgggattcagtgaagggatacatcagtttcagacatctggaatccagttaataactccagtacttttatatggcaaatgctactatgttgcaactttggtggacattttggaatgggagctggattcctatcttgaggaaaactgcggtcatccgatgttgtaatcttacatgcctctcaaggatgatcatttctgtttgttttccatcatagcctccttttctttagttgtgtaagtagttatgtttaatgatgttaatgagtatctgcaaacccattgcccagaacaaaacctatgattttgctactatcccacatctaacagtatgatagtcccacacaaaaaaccatccccttgtctcctcacatggagtcagtccagcatcctcaatctatgctcaccattgctttgtgacttttcatatagttttaggcatctctatggattcctaaagtgtgtatatttgtattgtctttagggaatttttttaaactaatatattgttaagatttctccctatgagctgtgtgtcactatcaaacatttgttttgcttgagccatggtatttaattatgtgaacatatcagggtttattcatctactccctggtgggatgttggtcattactagattctatctattttaatcagagtttctttgaacattctcatgcatgtcttcttgtacacatatgagaatttctcttggtaatatacctggcagtcatattgttgtagatgtcaactttaggaggtaatgctaaactgttttcaaaagaggttattccagtatatcttctcaaccgcaatgccagagcaatcctgggagtccatatcctctttagcccacagaatggtttctcagcacagcttgtcaatgaaggatcagactgtctgagtaataagtccaagttctaactcttgatcaagttaatgtaaaaatatcactttcaaacattggtaattttgatctccacctaaatctagcagtactgcagtaagatcctctttcctagagcattgaagccttgaaagcaatatggccaaagggatacaaatgtcacatggatgtttgggctagaaagttttaaagatctgtgtcaatccctgattctaggagcagtccattttcaaatatttgtgtctggacctttacatagatacctgaaattataattagttatttcaaagcatttttatcgttgtcctttaaaaaccaatcagtgaaactcctttaaacccttgagtggcactgaggtgagattaactgaaagattaggacccttaagtgatttttataggtttttcattcatgaagttataactctctataatatttcagctttgtgtatctctcagccatggctgtttctccagtacgtcttaagcatctcagccataaataattggaaggttaggtacatagtaggcagctgagaaaggtgagggtattgctttcctagcctgaggcttcaaaatagtcccaagcctggcattgcattttaatttttcactgtgccaaagctgtgtgtgtgtgtgtgtgtgtttgcagttgccttacatctctgttgcctatgctgacttctggagaatggtcaattatagggcatataaaatgaacagttgaactcataacaaggaaatctcagtttctttcaagtattctggttagaaaaaaaaagcatttgaaatcctctgtgacgatctgctgtcatgcatggtaagcatagcgtttcagctgcattcaaggctttatgtcttcattaaagagggtttttaaatgaaatagagagaggcatttgggaaaggttggctccaatttgtttgtgcaactcacatgggccaggttctttgaagggcgttggaatagctccatcagaacttaatggatttgtaggctgcacagggtatgtaacttccaacgggtgagtagcagcttcagagggtgcagttttgtaatcagaagcagaatgatcctattgtagaaagaaggaatcgtgaccaatccagtggactggtgagtaccgttggaatatagattttcatattagtcatttttcatctgccagcatatgagatccagtgccaagcacctggctagatggtgctgggatagctcttttagctctgccaaacatatggtatgcattcagaaagaagtctgtgaggtcagcctgcatccttgctgctccatggtagtcaccacatgtgcaaatagcttgctgctcacctgcttttctggggaaagttcattataggcagggctgatgttagggtgtgtgagagacccagtaagcaaacattgagccccaaagtgtcattgcccatgttcagaggcagtgctgggtccagctgttctgggacggcctttctaccttcagctcactgagtttggatttattacagctttgcctgtttaatagtcttctgcacctagcacaaagtaggtgcttgaaaagagtgatgtgactgaaagaatcattcagtctctcgtcttctagccctttcgcctccagtgctaaagggaagggagattttcccacttctccacctcatcttctaccttctatctgagaacttcctcactcgccttcagacacttgccttcagccagtgcacagaccatacagatgcctccttcttcccttggggtgtttgcacttgccactcctcagctgactgtcctttcctcagagcagtcttttctgaccatattgtctcaggtagctccctcttttattccctcccaaggcagtgatagatgattacttgctaactgcctgccttctctcctagaatgtaagcctcccaaaggcactaccttgtccagcttgattactattacactataaaatacactgaatacatgttcatatttgttgaataattgaatgaattctgcagagaaacaagctttaaatgcttggggatctggattgttcaaaggtcccagctagatcagcttcttcaaataggttttatcttgacaacccagttgctgctgcctgcaatgttgtgttgagaaggattctgtggctgtgcattattggttgcgtgctgtgtgcttgcctccctctcttagttgtgtgtttgcgtagcatcttgtagtgcagatttttctttctccttggagagtttccttgcctacactgtgcttccgaagactctgcaaggtacctttgaaaaaagaagccatatgtagcagaagcaaataggaaatgaaatgttcaggagattccaacaaaggcagaaattggccctatgcctcttcccattccttgttctgagtactgtgggttgacatcactctaggattaaaggagaacagtcttgcttaaacaccaatatctgaaacaccggcgggggggaaaaaggcttacagaacatgactggccaaggaaattgctttttgaataaatgcttccttctccgaagtctgcttcatcacaaacctccttttcagaaggagtttcatttcatttctcagtgagcatgtttttagaaacagaggcctgaggaaatcaaactggcagagatctctagtcccttttgcctcaccagttttctacccactgaaaaaccagaagggttcagatatgatggcgcctggggtgaggtgttggtgatcagcgattaattcctgaaaactgccctgagatgcaattttcccctcagaagaggttttccagcagggccctccgggcttagaggttgatccctatttgcagtgttagttttgctttctatgctgttttaccacccatgttttcaactatgttaactgaaagaacgttcccaggaatttatagagtggatcagaagagcactagacatacagcaaatttgtttggatgagacatacagtttgctgcatgtctggatccactagtggatccagtgtttgtgtgtctcatccaaacaaataccactctgagttatccatgttacattggttgagtgatttaagttccttgttttatgtggaaaatggggatgatgagctagcatagccagtatattgggaggaaaagtgtaatttagtgacgtatttgaccaatgcttattgaaaacctactacagtagtcccctcttatctccagtttcacttttcacagtttaccatagtctgaaactactaaatgaaaaattctagaaataaacaattcataagttttcattgtacaacgttctgagcagtgtgacaaaattgcacgccgtcccactctgtcctggccaggatgcggatcctccctttgtccagtgtagccatgttgtctacactacccgcctgttagtcactgagtagccatctctgttaccaggttgactgtcatgaaatcacagtgcttatgcccaagtaacccttcattttccttaataacagccccaaagcataagagtagtgatgctggcaattcagatatgccaaaaagaggacataaggtatttaagagaaaaggtgaaagttcctgacttaataaggaaataaaacaaattatatgatgaaattgctggtagggcgcggtggctcacacctacaatcccagaactttgggaggccgaggcgggcaggtcatgaggtcaggagttcgagaccagcctggccaacatggtgaaaccccatctctacaaaaactagccaggtgtggtggtgcactcccgtagtcccagctactgagaagggtgaggcaggagaatcacttgtacccaggagacagaggttgcagtgagccgagatcatgccactgcactccagcctgggcaacagagcaagactccatctcgaaaaaaaaaaaataaaataaattgctaagatcctctgcaagcagggatcttctgtttgtgcaattgtgaacagtgcattgttacaattgttctattttattcttggttgttaatctcttaacctgtacctgtacctgatttatacattcaactttatcataggtttgtgtatgtgtagaagaaaacagagagcatacatagggttcagtactatccctggtttcaggcatccactgggtgaagaagggggattcctatactggtatcagatacagctagccgagaggatacgaagatggatgttactctgactgggcaatgtggggactagacaggaagattttgtttttaccaagtttgatattgtttagggcttactattacttgaaaagcaaagaactactgggcgagtgcaaattatttctctactgaaccctgggagtcaggctcttgccacagtgggattttcgtctgacatatcagacccaactgttgggcaagatcgttccaatcccttacaaggttgagaagaaaatcatagcaatggggtgtcctaagaatatcaaccccttagtagctcctcacagcccagttccaggctcctgttcttcagctgtcctgatgttgtgttgtaagaaagttctaggccgagcacagtggtgcatgcctataaccccggcactttaggaggcggaagtggctggatcacttaagcctgggaggttgaggctgcagtgagctggccactacactccagacagagtgagaccttgtctcgaaaaaaaaaaaaattacctctaaatggtggccaatcaatcagggagcagtgttgcagatccaggaggcagtgtctggggttgtttttctcagatacacatttgaggatagaattactgatggtctccctgacaggaagtgactacctttgatattttaattgaaatcaactctgctcagaacctggagctgcagttgctctttgctgagatgctcctaacaggctttcaatggaaaactgtgaactttcatgtctaatcaattccagtgattttttttttttttttgatggcatgggcgtactccaacaaacctgaaatgcccaccttggttcgtggaggtttatatagggtacatagcatgttccaaagactattcatagtgtagttagtggagtaatatctggtccaaattatgatgctagcaaagtctcatttgccgctttggcaatcggcttgacaatgtgatacttcaatgtataattggataagcaattggggtctgttatagtacagtggtttggcataattattttccagcactgtgattttctagttaatacttacttttgggggttacaaattcttaaacatccaacactctataccccttgaaaatgggatgccactaattaatataagagcttatttcagcattttggccccacaggcagcactaaaaatacttgcttttactcaagtaagttatgcttaagtcaaagctttggcaactaatcaaatgattaatgctccattgattacttgaatttctgttcagaaaaggaggaggaactgggcttttgaactttcacagtaagtagaaggacctgaaggtaatttgtttgcacatagatatctcacagtctagtgcttagtccaaggtccagttcacaggatagagaagggaagcaatgaacatatttttctactaagtaatattcaaagaacttcagcgttctaaggtatcacaagtggcaggcagaggtttgtggtccaagaccattttctgcctcaagtgaaagcacctggtgattcattgggccaccaagaaagtccagcgtgggcgccagtctgctcagtaaccagcacatagacaaaggaagctccatgtctggcaggaaacatgtactgaaaggacagtgccagggaggtgccagaagcatgaaagcatccagaatcgtgaaatatgactcaatcagaatggtccaggaaggcttctcgggaactttgagaagtgaatgatagaagagaggcagaatggatattgggcaaaaactgagtgattttcacactagttcagagcaatcttggcagggaagccaggatctctgtgtgctttacagacaagcaccagggagaaagctgccagatgacaaggtccatctatagtgaggggccaagtcctctcacttagtggccatgacgctaactagcctatggggcaaatgagccccctctcccaaactttctcttctgattgttgccatcactttctccctttaattcattatccttccaggacattctttatgagcaattattctagtccttttacttccttgcctatcttctcatcacaccaaaaataaaatccaaacttctcagccctgcccacagggtgcaaatgatctgccatccccccaagtcctctctctcactcttccagcctgttacccaaccaccacacttccttgaaggtctgcacttgctgttctttctgcttgaaatattccttcctgcccctttacttaaatactcattattcacacctcaacttatatgctacatcttcagtgaagccttcctttaaaagcctgccctacccaaagttctaccatcccccataccattttttgacggagttcttataacatgaaattattttgactcccatgcatccatgaaaaatgaagctttctagaactcagcccagtagaaactgccacccacaagcattaaaggccaatgcatcaccctcacatcttgagtcaccctttcccacctcagttgtacttccttccccaggggccatttctcaagctgttaatgccatattttcacaccatttcatttcatatatttttaaaattgattcttttatgtttaacttaaatttactttaaaaggagacttgacatgatttgtcataaatgagagatgtccctaaaaataaatatgatctaaacaaaacaatcttattatattctagccagtctggatggctcttctctttctcttagaggtgttgttgatgccttatcaaggacgtactagtccgctgagactttattcttgaacagtcagagggactgaaagatcactgaaaagggaataagtttctctcagtaagattcaaagctgtttgcagctttgcatttgtagggccggagaccatcttttagacccctgttgtgcgtgcctattccatctttaaacaatggaatgttaaggcttctcaaagtggcaaatttcagctctcttgctaactctgatacatgtttgttagtagctgcctagaagccaggtcaggattcatcagggaacagtgctgtaattagttggtgaagctgaccatgggtacaagttgccttgctggggaactggtactcgcatcatgtgtttaacgaagctgttcccattgcccagaattaccctttcttcaaaatctcattaccatcttttaagcccagtccaagtccttgatttttaaaagtcagtctcagacctgaattccagcaagaattattttgtctccccctgccccagatactccaagaacactttgatggaacttctagttcggtagttaggccagtattaaattatctatgcatgaatctgtctgccttattgcatggtgaacctgaggaggcaaagatcttgggcttatttatctttgtatcatctttcataagacctagaacagagcctggaatatatcatgtgttcatcaaaacttggttgaatagaaagtaataacagaggatcagatctaaaaaaacaatacagttattttccttttgagactttatataaacccctgtgtaaacagaaccgtcaacccataagaaatggtttatttaagctctctgcttctgtatgttgttttataaaagtgataataatgaaatatgtttttataaaaacatccaagtttatattcagccgtttgcttctgtaagaagagcattaaagtagttttcccccgtttgaagacaatttggcattttactccaggttcgttccaaattctgaaaaacatttaaattattgtgaaccattcctcctactgcattccattacagaactctaaagatgtcaatagcaaaggcggtttgagcaatacagcagggaattcatcattaccccatataccttgtgataacacactcagtgcacaggagggagcacagtgtcaaaatcgacacgtatcagttcttcagtcagaaatcctgttaacactaccttccccaaaaaccatttctagcagataaagtgggatgactgaagatagattttttgttttaaatctcttttcaaagctgtgcagaaatagaatttgcttggagaggccatcacagacttcagtctgttgaatgtgaataaagactttggttcaagtttttgcaaacgttgtcactttggcgtgcactttcctctaaagaacaaagcttctgtgaaaaccgttttgactattgttgttgcatcagaaggaaaccagtatgtaatacatcagcgttggtgttgagcattttcagagcaagcagagtcacatttaacttacgtgacttacctgcagaaaggagagatggagaaatatagtgcactgaatcccagacacagtcagttggaagtgctgttattttatgtactactaagaaagaaaaacactgccaattaaactatgacacacttttggttataggacatgttttgatttcaaagatgttaaaatatgaaaaaatgtgcaccttagaactggtgaactaaggaattaaaatagtgcaggttgatttacactgcattccgtgcaataagaccatgcaataataataagccctggagtgcacaaaatgatggccttgaattttatcttcctgcacatgatcccctctgttttttccaggattcacagccaggcaactttgggaacaacctagttaccaaatgcaagccaagttcttcctgtgacacctttttaaggggtctgctatgttgagttgtcaaataaaatacaagaatcccagttaactttgtatttcaggtaaacaacaaatcattgtttcatatcaggatgtcgtctcaatactgtatgagacatccttatcctaaaacaagtcactgagtgtcttgtatttttgtttgctaaatctggcaaccatactcctggggtattgactacctttgacctccaccacattcttttaccataggaccttagcttttaccatgagaagcctcgattaataccttactcactccttaggacagctctgaggattagggattagtgagggtcattttagagctgaaggaggtacatttcctccccagatttgagtgtctcattataataagttgttttggatctgaattctgatcataacttttaatccttctacaaagtagttagttaggtccaaaagatacagatcactggggaaccatggagatgaaaaatacttttactcctagaaacaacctctgtggagtttttagtgctcgctgtcattaggtcagtgttatttagcctaaaaataatgctaatgactgacagtagtagcagcagcagggaatattaaataccacttaactatgtgtcaggcacggcactgctcaccactctttttcctactcccattttacaaaggggaaaactgagacacaaagagattaaaggaacttttgttcttctcattgttcaagctcagacctaactaactctcgccttcttggagagccatttttggatgatccgtagataacctctttccctccatcactgtttttcataacgtttctttgtgaaaccaaggtgatactcaaaagcctttgcaaggaggctagctctatccagcagccttcccattttgtaatcccatctcactaagaatcagccgtttggtgtgtaacctccctacctgggtgccccaggagaacaataaaggagtctgtctggttcagtgttccagtgctaggtctggcccctggcattacagagacagagcaactgtcttgtgtgttaacaagtagtcaccgccctcccctgtgggcagccaaagtaatctagaaggcttatcagaagtgaaactcctccattaaagttcacccacggcaaatactgccttttggataaactactatttaagatcattagggctttctctccgttagccaggcaagaagttgcagccaccaggttcttgggttgctttagggaaatggaactttactccaaactgtagcatttttagtcttcaagtcacctggatggatcttctaggacacaagtcttgcccaccagggcctttcccaggctccctatttctgcagagattaaaaacattcaaaggctgctgaactgcatccgcatgttagtgttgctaagacaagccttgtgggccagacatcccatggacagagcataaacagaagaaaagcagttctagggcaaggtttgcaaaggacagcagtagtactgttgataggatcacaagcaatgtgcttaaaggcaagcggattctttctatatgtgtgtgggctctatctacacacttctcccaaaaagcagtgattctcaacagtaagtgcaccttagaattggctgagaagttttgttttaaatccccaaacccaggctgccccagaccaattaaatcagaatccctggggtgggttttattttttaaagcttcctagatgattacagtgggcaaccaaccagggttgagtgccgctgttctaaacagaaccacatgcttccatctggggcttttaggagggaaatctcataacttttaaaagctaggtacaacagagtttttgcaaagatgattagtttttgttttatttatttcctattatttcccaaaaacttcttctaaggattggcacaatgttgccatctgtaaggcatatgacaataacagacggttgcctaataaccaggaaggcattaacattcacaggctctaaattatttggattcctctggtatgatctgtgttgttgaggccacttaatgctttatttctgtgtcttccaatggcagtagcagaagtgggaaggccatatttcctgggctttgcatatctctttgtcatcctattgaattgttataagataagatggatttataacagacgtcaaggtagtatcaaaatgaaaattagttcttgagtagaagaatagcaatcccgtttgccttgcctgtagcaactgcagcatgtttgcctctgcaagaaaggaaatgacttcttaatgtggttttctttcactaaggagaattaaatctacatggcaaaatgtaaaatcagcgtgctggcagccaaattctgaagggaagatccatgaccctcataaatgtatctgtggcccggttatatgctaatgagcctcatttaggctcaaacttacttaccaggagtggaaatacagctcagcgggagtgcgaggctatggttccctcactgttttgccttctgtatcaatgttgagctgcaataaatggggaaatttctccatctgctgcaagctgccagggtagaggcctctaggttagatttagagtttggggcctgagatagcaaaagtcatttattagttgatagactttttgctgagttggcaaaattatttttaaaggatcaacttttaaaaagtcgatattttaatcgttaagttgacctttttcaaaatggagtggaacagtatctgtgggatgctctttagggacactgtagatccctcaggatgaataaaaaggcaaaagttgttggggataatactggcacctaccccactacctagctgggtgatctttggaccggggtatgaacttcctcagaactcagtttcctccacagtaacatggggttaagtagcgtcagttttatgagttattgtaaggattaaacgaaataatgtatatcaaagaaataatgtgcgcctttcacatcataaatgctagctatcattggtgctattaaattgtctcaatcccaaatgacttttaacacataacacaaaatactacactgtgcattcccatgaagaatgaacggataacctgcggcattttacaatgtatagagccacacacaggaacaataaatttagttaatgaaattgaatcataataggaggttaagggagaaaattgagcatttctaaggaagagagttctgagaacatcctctctgatagaattgaaattgtattcactctatatgtaaatctgagacatacacacaattttttaaatatgcctgtaatctgaggaggaatttaaatgattcaagtgttaattttgagacaaattgttaattttttgtaagttgttttctcatttaatctcttttttactgtttccctgcttgaaccctcttttaatggaaatacttattacttactcagttctcatggcccttgtgtcattatcataaatttggttcactgaacaaaactgctcagagctcatgcaagagagtctaaaccaaagagagtaggaggtaaaccacaggccaccttgaaggaggggattatgggttggtggcaaactcaatgccttcaaaatccaggaagtaaaataaatgaatgatgcctattaaacataagaaaattagaagagtgtgggggagattctgggaatggcaaatgctccccattcccccacttcatcccaatctgtgatcacctgtattagtccattcttacagtgctataaggaactacccggggctgggtaatttataaggaacagcagtttaattggctcctggtttctcaggctgtacagaaagcatggttggggaggcctcaggaacctttcaatcatggcggaagggaaagcaggcacgtcttctgtggctggagcaggaggaagagagagtggagggaggtgctacacacttttaaacaataaggtcccccaataactcactatcatgagaacagcaccaatggggaattctgccttgatggtccagtcacttgccaccaggccccacctctgacactggggattctaatttgacatgagatatgggcaaggacacagacctatatcatatcatcacccccctcagcctcagtagatgattacaagatggcaaatgatctgattattttaaatgtggattcttgtataaagcctatttgcaagttgtagcaactgaaacaattaaaagatacacctactggcctctaatttgcaaattttgttcagtctcccccagccccccgaaatttgttcaaggagatcccaagggcccatgaaagagcctcttcctttttttttctccaaagctccagaaacatgacaaggaggactttcctgcctcttggagatcagaggaggaaatggcagcagaagccgcagctctgcgggtctactttcagtgacacaggtaaagactgcatttcgtcattacccagaccctcccgtgggcctcaggaaagaggctgcactctcagaatggggatgcacaaaaacaccttcaccagcatccttgggtggtggctgcaaaggacaaagagctggaggggagaaaaccctggcccttgagtactgtattcccagcctcccagtctcttccaactctcctgcctcttcactctcttcttccaagccagtgcccccagcccaccaccacctttctccagtctttcctgcggtggtgctcctccagaatccaatgttcacaaagcagaccttctgtcatgcacaacttcttgtttaaaaggtcaaccccaacttaacttaagggtgtgacatggcccttaggctcaagtctgtctgcaaagccctgtaaaccagctttctctgcctccctaacacgcccccgggcaaactcctctgctttcgctgagtggactcttctcttcagttgctatttggtaaattgcccttcatgtttccctttatgttcggctcctaggaagctcaggccacagggaaaagtcaaggcttgatagaattaatctttgtcttaatgatgactaactgttgagagatcataggtttaagactcgtggtagaaagatagctatagccaatttccttgtcaaaatgcttctactccaaatttttatgcagtgtctaaggagctcatgcctagatctatctggcaatctatattatccctcctagtctcagttcacatagtagactgctggaatgactgagggtgatgtttggcctgtaaacaaaaagtgttaaagaaggccaggtacagtggctcatgcctataatcccaactacttgggaagctgaggcaggagaactgcttgaacctgggaggcagaggttgcagtgagctgagatcatgccactgcattccagcctgggtgacagagcaagactcagtttcaaaaaaacaggagagagagagagaaatgtatctatctctctgaaatttgtttataaatatagggttaccatgcaatactggcatatatctagactaaaaaaattacttgtttatctgaaattcaaatttaactggtatcttgtatttttttctggcaaacctgttaataaactcccatggaccccagttacagatcctctcctataaatagtttcttttttgtttttagaattagataattccaaattaaaattaggcaattcttcatctgacctgtgaataaatatgttcatgttataagttgcagaagtagatcagacacaaataaaaaacaaaattagtgaataaatgctgttagcaattgattggaaaaaattgtatcaaccacttagtgatcatgatttttagctagaaaacacattcattgtattctgatttcaccttgaaatgtaagtaagtctttactggatagctttaaatatatgtgcacttggcctttctctccccagccctctttttagagtattctaaatagttaaagacccagactaccttgccccctattgttgttcaaatatggtgttgtactcagatccttgcattctagaaagcttatttcattctcccatgtcataagtttgtcagctctgcactcagttgcctggggggatatggcaagtgctgtaacagaggctgtctttcatattttattttgaaccttttccactgttcaccatctctctctcgttttttaaggatcaagctagtttagtttacctaagaacataggcctatgggcatgactacaaacctctttctgttcctcttatgaaggccagtatgtcattttagagtgccctgttcaaatttaaatggggtgacaatacctcagacttgactgcctaggttgaattttttctcctgggttttctatgcagtgggtattttcaggtagaggctagaaagctttagcctttttcccaaggcttgctgaattgtaggagttttgtcttagaacgctttttctagacactttaagaactttaagaagattcaaacttattacccaaatttcctgtaggctttgttttgtcagtttttgcttctgtcttgcctggaggcctgacacctcctgtcttccaggtaaattgacttcccttgtacatcttaccagaaagatatttaccctaacttgttacacaaactattgccacagtacctgtggatttttaagttaactaacatgtgtatttctctttaaaggttttgtgcacagaccaaacaaatcaccctcagtcttcccagcagtcagatgtggtaactaagactaggacggataatataggttgtgaggtggcaaacaacttagggtcctaagattttgccaagactgtcatcattacctggagtataatgggactaactatacctccctttaaggacaatggaaacattctattgaaaccatcctcacagggttaacaagaattagatgctgggttctggacagaaatatagttgtaattaagcattaatcaggctgcactttggcccacttcttcgtaaccaaaagtcccagagcaccagatgctaaccatttgcctcctcattgttcctacagagaagatttctgatgttagaatcataaggcctttgtttgtttaaaaatggcttaagatgtttttcagatcctgaattccagcaaaagagctattgccaaccagtttgaagaccgcccccccgcctctccccaagaggaactgaatcagcatgaaaatgcagtttcttcatctcaccatcctgtattcttcaaccagtgatcccccacctcggtcactccaactcccttaaaatacctagacctaaacggctcagacaggcagatttgaggtttccccctgtctccttattcggcagccttatgattaaacttccttctctgctgcaaccctgtgtctcggtgtattgacttgccatgaattaggcaacaaacctattacagttacagttacttttttaaaggaaattcaatcgttggattggtccacctgcttatttcttcccttttcaaaaaaaatgtctacatattgaatttttatacattaagtggttcatgaaa

SEQ ID NO: 1720 - DNA, 1213 bp, Homo sapiens
ctgggaattgcagtccccgctctgctctgtccggtcacaggactttttgccctctgttcccgggtccctcaggcggccacccagtgggcacactcccaggcggcgctccggccccgcgctccctccctctgcctttcattcccagctgtcaacatcctggaagctttgaagctcaggaaagaagagaaatccactgagaacagtctgtaaaggtatcctaggaatacctgcctgcttagaccctctataaaagctctgtgcatcctgccactgaggactccgaagaggtagcagtcttctgaaagacttcaactgtgaggacatgtcgttcagatttggccaacatctcatcaagccctctgtagtgtttctcaaaacagaactgtccttcgctcttgtgaataggaaacctgtggtaccaggacatgtccttgtgtgcccgctgcggccagtggagcgcttccatgacctgcgtcctgatgaagtggccgatttgtttcagacgacccagagagtcgggacagtggtggaaaaacatttccatgggacctctctcaccttttccatgcaggatggccccgaagccggacagactgtgaagcacgttcacgtccatgttcttcccaggaaggctggagactttcacaggaatgacagcatctatgaggagctccagaaacatgacaaggaggactttcctgcctcttggagatcagaggaggaaatggcagcagaagccgcagctctgcgggtctactttcagtgacacagatgtttttcagatcctgaattccagcaaaagagctattgccaaccagtttgaagaccgcccccccgcctctccccaagaggaactgaatcagcatgaaaatgcagtttcttcatctcaccatcctgtattcttcaaccagtgatcccccacctcggtcactccaactcccttaaaatacctagacctaaacggctcagacaggcagatttgaggtttccccctgtctccttattcggcagccttatgattaaacttccttctctgctgcaaccctgtgtctcggtgtattgacttgccatgaattaggcaacaaacctattacagttacagttacttttttaaaggaaattcaatcgttggattggtccacctgcttatttcttcccttttcaaaaaaaatgtctacatattgaatttttatacattaagtggttcatgaaa

SEQ ID NO: 1721 - protein, 147 aa, Homo sapiens
MSFRFGQHLIKPSVVFLKTELSFALVNRKPVVPGHVLVCPLRPVERFHDLRPDEVADLFQTTQRVGTVVEKHFHGTSLTFSMQDGPEAGQTVKHVHVHVLPRKAGDFHRNDSIYEELQKHDKEDFPASWRSEEEMAAEAAALRVYFQ

SEQ ID NO: 1722 - DNA, 1294 bp, Homo sapiens
ctgggaattgcagtccccgctctgctctgtccggtcacaggactttttgccctctgttcccgggtccctcaggcggccacccagtgggcacactcccaggcggcgctccggccccgcgctccctccctctgcctttcattcccagctgtcaacatcctggaagctttgaagctcaggaaagaagagaaatccactgagaacagtctgtaaaggtatcctaggaatacctgcctgcttagaccctctataaaagctctgtgcatcctgccactgaggactccgaagaggtagcagtcttctgaaaggtctccgtcggatcaatcagtggaagaagggggttgctgattcacattacgtaaaaacacaagtcctcacttgagtcatagacttcaactgtgaggacatgtcgttcagatttggccaacatctcatcaagccctctgtagtgtttctcaaaacagaactgtccttcgctcttgtgaataggaaacctgtggtaccaggacatgtccttgtgtgcccgctgcggccagtggagcgcttccatgacctgcgtcctgatgaagtggccgatttgtttcagacgacccagagagtcgggacagtggtggaaaaacatttccatgggacctctctcaccttttccatgcaggatggccccgaagccggacagactgtgaagcacgttcacgtccatgttcttcccaggaaggctggagactttcacaggaatgacagcatctatgaggagctccagaaacatgacaaggaggactttcctgcctcttggagatcagaggaggaaatggcagcagaagccgcagctctgcgggtctactttcagtgacacagatgtttttcagatcctgaattccagcaaaagagctattgccaaccagtttgaagaccgcccccccgcctctccccaagaggaactgaatcagcatgaaaatgcagtttcttcatctcaccatcctgtattcttcaaccagtgatcccccacctcggtcactccaactcccttaaaatacctagacctaaacggctcagacaggcagatttgaggtttccccctgtctccttattcggcagccttatgattaaacttccttctctgctgcaaccctgtgtctcggtgtattgacttgccatgaattaggcaacaaacctattacagttacagttacttttttaaaggaaattcaatcgttggattggtccacctgcttatttcttcccttttcaaaaaaaatgtctacatattgaatttttatacattaagtggttcatgaaa

SEQ ID NO: 1723 - protein, 147 aa, Homo sapiens; identical to SEQ ID NO: 1721

SEQ ID NO: 1724 - DNA, 485 bp, Homo sapiens
ctgggaattgcagtccccgctctgctctgtccggtcacaggactttttgccctctgttcccgggtccctcaggcggccacccagtgggcacactcccaggcggcgctccggccccgcgctccctccctctgcctttcattcccagctgtcaacatcctggaagctgattctaaagtgcatctaagattgaaaaccactgattctaataacacagcattgtggaatgattcgcagctgattctaaagtgcatttaacattgaaaaccactgattctaataacacagcatcgtggaatgaatcaggaactgactcagcacaggaggacagctttgactccctgtgatttcatctccaattcgaccgatcagcactccccactgcctggcccgctacccaccaaattatccttaaaaaatcccagtctctgaaatgttccagggagactgatctcagtaataataaaactctggtctcctgttcagcc

SEQ ID NO: 1725 - protein, 44 aa, Homo sapiens
MNQELTQHRRTALTPCDFISNSTDQHSPLPGPLPTKLSLKNPSL

SEQ ID NO: 1726 - DNA, 864 bp, Homo sapiens
ctgggaattgcagtccccgctctgctctgtccggtcacaggactttttgccctctgttcccgggtccctcaggcggccacccagtgggcacactcccaggcggcgctccggccccgcgctccctccctctgcctttcattcccagctgtcaacatcctggaagctttgaagctcaggaaagaagagaaatccactgagaacagtctgtaaagagtgagaagtggaccttggaccaccctgtctggagtcattccctgggcttctccagcccctgaagaaaatagtctcactcttgtcacccaggctggagtgcaatggctcgatctcagctcactgcaacctctgactcctgggttcaagatattctcctgcctcagtctcccgagtagctggtattacaggcatgcgccaccacacctggctaatttttgtatttttagtagagacagagattcaccatgttggccaggctggtcttgaactgctgaccttgggtgatctgtccacctcagcctcccaaagtgctgggattacaggtatgagccactgtgcccagcctgtcagtcaattttctaggcaatttatagacattactcaaaattttttgaacaggcaaaaaacaagtaactctattaaaagatgggcaaaagatatgaacagacacttcccaaaagaagacatacaagtggccaacaaacatatgagaaaatgctcatcatcactaatcatcagagaaatgcaaatcaaaaccacagtgagataccatctcacactgtcagaatggctattattaaaaagtctaaaaacaacacatgttggtgaggctgtggggaaaaaggatgcttataaactgttgtcgagaat

SEQ ID NO: 1727 - protein, 154 aa, Homo sapiens
  VARIANT (1)...(154): Xaa = Any Amino Acid
MRHHTWLIFVFLVETEIHHVGQAGLELLTLGDLSTSASQSAGITGMSHCAQPVSQFSRQFIDITQNFLNRQKTSNSIKRWAKDMNRHFPKEDIQVANKHMRKCSSSLIIREMQIKTTVRYHLTLSEWLLLKSLKTTHVGEAVGKKDAYKLLSRX

SEQ ID NO: 1728 - DNA, 552 bp, Homo sapiens
ctctgtccggtcacaggactttttgccctctgttcccgggtccctcaggcggccacccagtgggcacactcccaggcggcgctccggccccgcgctccctccctctgcctttcattcccagctgtcaacatcctggaagctttgaagctcaggaaagaagagaaatccactgagaacagtctgtaaaggtatcctaggaatacctgcctgcttagaccctctataaaagctctgtgcatcctgccactgaggactccgaagaggtagcagtcttctgaaagcattctgtgtgctgaaatgggaagtatgcagaaagaactgctgctgtgtactgacatatcatggttgtctcaaggaaaagcacttgtgagactgggtagtgaaatgaaccagctaccttttatatggaacactatttttctgcatgaaagaagcattgaaagacaaactataattatgcaaactcaagtatttaacatattttctttaaaatgcacaaagtgagtctgttgctttaagtaaaccgttggccagtatttgttgatagtgata

SEQ ID NO: 1729 - protein, 68 aa, Homo sapiens
MGSMQKELLLCTDISWLSQGKALVRLGSEMNQLPFIWNTIFLHERSIERQTIIMQTQVFNIFSLKCTK

SEQ ID NO: 1730 - DNA, 412 bp, Homo sapiens
agcagaatgatcctattgtagaaagaaggaatcgtgaccaatccagtggactgctccagaaacatgacaaggaggactttcctgcctcttggagatcagaggaggaaatggcagcagaagccgcagctctgcgggtctactttcagtgacacagatcctgaattccagcaaaagagctattgccaaccagtttgaagaccgcccccccgcctctccccaagaggaactgaatcagcatgaaaatgcagtttcttcatctcaccatcctgtattcttcaaccagtgatcccccacctcggtcactccaactcccttaaaatacctagacctaaacggctcagacaggcagatttgaggtttccccctgtctccttattcggcagccttatgattaaacttccttctctgctgc

SEQ ID NO: 1731 - protein, 43 aa, Homo sapiens
MTRRTFLPLGDQRRKWQQKPQLCGSTFSDTDPEFQQKSYCQPV

SEQ ID NO: 1732 - DNA, 34064 bp, Mus musculus
ctttgtgctggacaagctaaggatgtagtgaatcaataaagaacctggccctggatgttcttgctatggagcccaccaaatcagagacaaagatattttataatttctgtacttgaaaggggacacagaggctctgtatgtgcagtcccagagaggactagttgtaagactccactcaaagataaaaatgaatcaaaggttctatttttttttaatgtgaacaaaaactaatgttaggcacagaagaattcaagtaatttaagttttaatagttgaaactcacgatgtggctataagataaacccaggagtaaattcatcacagcatggtgttttttgaacaagcaacgtggccatcagaatacaaaaggaaaatcagagactcgtggtaaatcaaaatattacaaccatcacacatgtcaggaagatgcaggaaagatgaaactagattcaggtggcagggaaagagaaatacctgttcagtggcttaggactcatgggatctatcgtatgactcatgggatccaccaggtgactcatgggatccaccaggtgacaggaatctgtgtcctttcagttccatggcagttgaccactttctgtctctgagtttctgtgttccagtaaactcttaggaaaagggaaagcactataaaaagagcgtttgtcttttccctctacattcccagtgttcctggacaatagggtatggctcctgactgagattcccacggattttaaagaggttaagtaaaagctaactgtctttgttacttttctgttgctgtgattaaacaaacttacaaaagcagcatttaagggagagaagcttactttgttttatagttgcaagatactccagaaagtcaagacagcaggagcttgagagctgttgtactgactgcaggcagggagcagaggaagatgctgtactcaggtcacttcctccctcttacccagtccaccttccagtcacccatagtggatgggtcttcccatttcaattagtcaaatcaaaatagtccctcacaggcatacccaaaggctaatctaatctagtaataccttacataatagagctaataatctaataatcttccatgtgtgtgcctagaggtgtgtctcctagatgattccaaatgctgtcaagttgatgatcaacaaacactaaccacagtgaaatctatgaagacaagttattgatttcatctcaagcctacttgccacgtattcccagaccttcagaaaagtagaacttccataaacaccaaaacctaaacaacccccacacttaccaggcaggcatgctagatcaacacttctgaaagtgtggcctggacaagcaacagtagcttcattacctggaaatgatcagaaatgcaaattttagctctgatgagtctaatctctggatgagaccaatctcctctcacgtgactgcctggaatggacggctttctcttcccagaacagcctccaggtggagcaaagctaagttagcagctaactgaggttgggtttttgcagtttcctctttctgcctttcggaattgcctaacttagttaaaagaattaacaggtcccatctgtagttgacaagggaaatattccagtctttgagaaaaccaagggctcagaaatcagtctagtcttgacaatcatcacaatgaaggtttctagtatttaccatgtcctagaaaatcaaaagacttgatttctgtagttgtttttattagcagaatactaaaactaagaagaataactaagcaccatcaagaaaatgagaagcctattttcagtcaaattcataaattatcttgatggtttcatacttaggatgcactaggagcctaactggaaacaggagacaaagttaaaagttgcacagtccagtacacctgttaccaagtgctgccatgttaagctgtcctggttacttttctattgctgtaataagagaggtgagcaagacaacttatagagcaacatatttaattaggggcttaacgtttcagagttttagagcaagaacattgggtagaaactgctgaaaactcccaacttgatctggaagtagaaactactattcaagtcctttctgtatagttttttttttttcttgtggctgttctagtgaaaaaggtgttcaatgcacagcttgacacaatctagagaccctcctgcctctgcctcctagtccacatttctttcatctgaaatgggattaaaagctcaaatttcaacacatctacctatcactgtgtgctttttgtcttgaggatgctttgataatttagagggccaacattgttttgaaataatttgactttgggttgttaaacatttttctgagcttatggattttattttctctctttgagagtctttggaacctggtttttactttattcttcagggaccaagagttcagggattagagctatatcaaaggtgaggattctaatcagaaatctcatcccataaactctgacctcaaaggaaaggctgagtcagaagtaagaaagtgacatggaaaaaggctgtcatcttaggggatatcacaggctatgatttggtaatttcacagggcagatttagtcctatgaagagaaactcaaatgtggggtgacagcccgatggcagagcacttgcctagcatagacaaacagaaggaaaggagggatgaagaaggaagggccaaagatgagcagtgctacaggcacacaaatgttaagaatgctattcctaagaattggagttaatctagctgttccaccccgggagcaatgcttgcagctgactgcagttcagaaactggaaatgattgttcctgtgttacttactatacagagcagacttgaacagtagcaaagacagcagctgtgcccatttcataggtgctttagagcaggaaacctttaggagatatttccaactaaaaatgttcaagtggtacctctgagctttaaatttgtatagctaggtaaaatcagattgttcttgttattttccaatgaagttttgaaggtttggaagttgttcctctagagggagcccaagcgcttgaaaactgaaagtgaacctccccaggcatctttccaggggtcaagatttcagagctgcagaggaaaagccttgaaagatgctactgactcggagactcctaggctcagcctccgcccatgaagcagataacagtacacagaaatcttcatgatcctgctagcgctgtggcaacacacacctgcactcctgaaaagatcttcctagtacaggaccaatacctctgagaatttctcatgctcttcccaccccgctttagtcaccttgatcgttgcttggacccttgaaaacagaagaagaaataaaaacttcccagtaagctgcagacttttgttttgcttctggttctacgtagctttgatggggtactgaaactggagagcctggaggttgaggctgtaaagtgaggcactgtgctttctcattacaaatcccaaacacaaaacagcacaactcagagatcagactctcctcttcttgcaattgcaaaggggagcgggatgtggctttagacagtcttcaacttcacccattttttggatttgattctaagatcccaaattcagctgcaaactctctttcctataagccacttttgcatcaaagctacttagaaccagaagcaaaacaaaaagctgcagcttactgggaagtttttatttcttcttctgtcttcaagggtccaagcaacgatcaaggtgagtagagtgtggtgggaagagcatgagaaattctcagaggtattggtcctgtactaggaagatcttttcagactctcctagaactctctggactcactggcaagagattggtgagtgtgactattcatcctagagtctagatgtggaaatggcacatcaaactcttacttgggcatggcttacccaggaagcttgctttccccaagcctggtggatgaaatgaatggatgcttttctagcttgccagctgtggagtcttgccccagacagctgctgcactctcctgcctgcctggcggtgcggtgcctcctctcccgtctgcctttcccactcagcctagtagcaccactgctgattgttatgcttggtgttatcattgttctagagatgatgaagctgggacgatggctcagtggttgagagcattggctgttctacctgagaaccaaagttcaagtccagcattcacatggcattcacaaccctctgtaattccagtcccagggaatctgataccctctgtgactctgtagggcaccatgtgtatgcatgtggtatacacacttacatgcagacaaaatacccaaacaaattatatgcataaataataactgatagataaataaatgtctgcattctaaagacatcatagttgtttaaaaccaagagaggtccaatgatacagcaggaatatgctattcacgataatgagtgagaaattactgccatagacaccttggctcagcttcccccaaacgctggagagtgaggtgtcagggaagtgtgacagtgttctgttacctactctcttcactcaagcttcactaaccttccacacagtccacgtgttagaattctggtctgcatcacattctcaaaatgtccttttctggcccatttgttcggaccataacctggttccagacttggttttgcttcaggacccaccttcctaaaatctcactagtttgctgaaggcttatccagccacccctgctgagtggcctgcttctgccttccatcctgctcctcttgatctcatttgatctgatataaaagaaggtgtaagttccacttatatcttccatctagaatgaaccagaagctgtaattcctgttgctttttagttcacatcaaagaaaataaacactgattggatgctaatatccactcttgggcgatatcagtttggacctttacaaaatacattgcatttattcacgtgtgtgtgtgcgtgtgcgtgtgcgtgtgcgtgtgtgtgtgtgtgtgtgtgtgtgtgtgtgtgtgtgtgtgttgtggcattatgtggcagtcagagggcagcttttgggaggcacttctctcctttgagcatgtaattccagggatcaaactcaagtcaagaggcttggtggcaagagcctttacccgatgggcttgttggcccagtttgagcttttcactgaacctatagcccctctttcaccatcagccacaaaaaaaggcaatctctgtagtgttaaattgggtcttatgtgagtttctagttcccagcaaccaagtacttaaacactttagttgtaattcaatatagtaactaaattgctgattttaataggaattacagactgttgtttatctgatcctgtcttgctttcggtagccttagtcgatagtcttctataatgtagaacatttatcatttggaccgatttgctctcttgaagatacattttttaaggaagtttgcatgtttaatttgctactcaaataacaattttcaaactaggaagtgagtgcaccatgaagttcaaatgagaactctctcagtagattttttttaaatgcttcggactaatccaaacgttgtttctacctcctttgcctgcctcggtgttcccgggaagccttttgtttttctaatgagaaggcagagtagggcggagcagagcactcaggacaccatctctcctcttgccctgccttcactgcaggtgggatgcctgaacccttgaagaagccgaatggtaagcttggcctgtgtcttccagccaagcagaaagtatcatccagaagccttgcacagtaaggccagtgcttgtcacaagcggcatgttgcacgcgatctgaaaggcagcagagaagcagcatcatgctggccctgctctaaagacaaaatgcaagtctctgggcatgctggtggctttcccacactccctctgataggctggcttatcctgctgcataggacatcacctggacttgaagctcctcgatctccaccaatggtttcttcaaatctcaagtcaagtacatctttagaccatgacgcttcttctgcaggatactgatgccactaagactggaggtgctaagtaagacacgtgcacatccagtgtgtcctcaaaggcttcattcagtccttcctgagttctagattacctttatggttctgaggttgctatcctctatgacaggagttcttctctaacaggagttctagcaggtccttaatgaggttcaggctcaaaacaagaaccaaggatagggacaaacactgtagtctctgctaccaatccccacatcatgtagacagtggttctcaacctgtgggtcacggcccttttgggggttgcatatcagatattctacatatcaaatatttacattacaattcatagtagtaggaatattacatttatgaagtagcaatgaaataattttatggtcggaggtcaccacaccatgaggaattaaattaaatggccatagcgttaggaaggtgacaaccactgttgtacaacctaaaggactcttaacttctgcaatgaaaaaaatattccacatatgagcttcttcgaaggggagtcactaatagctagaactatacctagagaaacttcattttttttccctttaataaacttagatctaaactgtcatgtggctactggctagcgattggacaatgaaaggcttataacaataaaatctgcattatttatctctaacagtggacctgtttctctggctgaatcttgactagcatagaaacaaggggaagagccttgctccaaaaagccaaagaatagatctgacagagctggaggatcgcaagcatctaccagcatgtacaagcatgtaccagcatgtacaagcatctaccagcagaccacctagaaacttcccaggactctgtggactgtcgccaaaaccatcctttaaatctaacctctagttttcagtgacttctgtttgctacagtgaatggtgtgagccttgtgtagtttattacagggcacagatagtgttcttagaattctctttgaaaaaaattatttagacatgcatagatatcaagaagtaaagtttgagtgttttgaaagacataactcctgcaaatagaaacatgcaagccccggtgttagcttcctccaagtagttctccttcctttcatgtttatctttgcctgcctttgaaaaatgacctatggtaagtagcttcccttccaaagcccctgagttacagatccataaaggaaaatatgaattttatatttcaagtaatatgtattagtcagagatcctcaaagaaataggaccaattgtatatgtctttctctttatgtgtgttctgtatacaaagtcatatgatacacaatgtttttgtcaatagtgtacgtcacactcaaataacaaaactgcctagcaacagctttctcagtctgtattccagcccttgatttacatgtggctctctatgtgtgtctacttgtaaagccagtgttatgtttggaagaagtctcaagactgaagagctaaaagttgagattctagtcagcctgaaagcctgagaatcaggaatgtcaatggcggatcaatgccccaaatgaagctgggtatcaaccttcacctatattcctagtgctattcactcagcaacagaccagatggggcccacccacaatggagctgttatgtgccttagtcagtccagcaatgtggatgctaagttctttagaacacctcccagatatagtcagacatactgtttagtcagctcctgggcatcccatgcctgaccaagttgacacacaattactaatcacatggtgttccccaaacacaatggcttcatgaacaggaactgaaaattagcaaagctgtatgtcccaattctaaaactgagggtgttaatatatttttctattaagaaatcctagactctggataaactgaacttgtactgggatgctgacactacaattagaaatgggaagaagccactttcaaactacagaagataattcaatttactgaaccgacctgatggtctgagtaggtagagatggcaaactaagcatccagtgagactgctgaaacatggaacacagtaggactgctagctctctctgtgcaactactggaaacaaacacacaaacaaacaaaaatgctaatttgaatatgttgcaaatgaaatcacgaagcccagaaaagtaattactaagatatgaactcctaagaattatacaactagctctggtctttttcttgtgacatattcacctttaagtagggatcactcacggagccccaaagccacctgtcctgtagacaaacttccctgcaccagggaattccttgcttaaacccatgtctggggcttcatagtggcttcttcccccaggatccccaagactgtctcacatgcagggagtgcataccctagggtctgaggggttgttgaggaaggggtatggacagagcttagtaatcagaaactagattgtccacacacctctgtgagaatcttctcacagtgtgctactaagttggggtagagactagcagaaaaaggcagagggtatagggatgagatctcgaattttctctggtatccattaaagtcagcagagtcatgtcactcatgtagtgaaaaggtagagacaattatatagaaatagagccacaaggggcttttgttataaggtgaccatggaaacagaaagggtataaaagcctttggaaagtaaacacagtggaaacagcatcagagtcttgcctgttctgctcattccccaaccatgtgggaggagatggcacaagatggacatgggagagtccactttgggtggctgtgtggaggacgctactggcctgcagtttacagcctgaaaggaaactagaggagtttgacacccactgcatccatgccctacaaacttagcaatggagtggatagcttcagctgtgggaaatgagcctgtaggcctcccaaatggattctgcttcccgtattttgctagaaaacccctccagtccccaggccagaagcatggtgagctaagtcatgagaagcaaggtgtactccataaataatctttccattgctttttctttttcctgactcctgggcaaacctttctttctcagcacactttctttctctgcatgaaatacactttttctagtagtatacccttgcctacgttgtctgtcaggctggactgagaaaaccagaaacactgctgcatttttaactactctgtaactatggcaacaaatgataaataactatttatgccagcttcattgtgaaactggccaattaccaaaacactccgggaataaatccttcgaatggttaactgactgtggagagacgaatgtgaacaatgtattaacagattcttcaagattgagcctcaatagagaacacttaagtgccatttgttttccatctggggccacaaacatgactctagaggattacaagaacagttcctgttttgttttgttaggattgcttaagcaagtcgttgttataggaaggcaaaggccactctgtggtgtgcacggttccatttcttggatggataggtttgcttttcagttccttccagtttttgtcccacctttgttgggtatctttctggatgttttgtgttttgttttgttttaaaggaaaacaacaacctctctcatattcttacttcaagttgtcttgatgtttttgtgcctcctccacacctcacagggctggactctcttaacctcagtttggtgagttcctgttaccccagtcttattaaactgtgctggttcccagccttctgctagggctaaaggcttcagagctgaagtcagaggcactgcaacttccaacccataggaaggaagaccttatgggccagctcagggtgagcgctgggaacgcccccaggtcccttctagagccctgtcagtgtgtgtctgccctgcctggccccacggcagcagctcgcaagcaatctaaattgctttcctggattccactactggacttgccccctgaaggcgctggagggagcagctgctctggcaagcaccccctgctagggcaggtgaggcacagaagcaccgagagcgaccggatattgtagtgaagaggccactgtacgtacaggcaggagacccaaacaagtctgtccttggtgcgagttgggggccggaagggagctctggatttcggtccctccccttttccctgctctgtcttggagccctggggccatcagaccctccgactgtctggtacttgcctggaagagatatcatctctcctccacaccctccaccatggacaattttcttaatgactccaagctaatggaggactgcaagagtcgtcagtggctcctttcgggggaaagcccagccatcagctcggtgatgttctcggccggggttctggggaatctcatcgcactggcactgttggcgcgccgctggcgtggggacaccgggtgtagcgccggcagcaggacctctatctccttgtttcacgtgctggtaacggaattggtgctcactgacctgctgggaacctgcctcatcagcccggtggtgctggcttcatattcaagaaaccagaccctggtggccctggctcccgaaagtcacgcgtgtacctatttcgctttcactatgaccttctttagtctggccacgatgctcatgctcttcgctatggccctggaacgctacctctccatcgggtacccttacttctacaggcgccacttatcgcgccgcgggggtctggcggtgctgcctgtcatctatggggcctccttgctcttctgttccctgccgctgctcaactacggggagtacgtccagtactgtcctgggacatggtgctttatccggcacgggaggactgcataccttcagctgtacgccacgatgctcctgctgcttatcgtggctgtgctcgcctgcaacatcagcgttatcctcaacctcattcgcatgcaccgtcggagcagaagaagccgctgcggattgtctggcagtagcctaagaggccctggatctcgcaggagaggagagaggacttcgatggcagaggagacggaccacctcattctcctggccattatgaccatcaccttcgccatatgctccttgcctttcacagtaagtcacctttgtttccacagccccgcaagcagcccgcgcagcctgctcaaactcctctcaccccaccctttccacctttaggcacagcctgggtgggaaatgtcttaattgacaaaggtcaattgccttcccctttccttttcaccttacccacttccttccttcctcctcctgtctttgcatatgactgttgctacttagcacttcttctaagaacctgcttggtctcttccctgggttggtaactgaagaggagggagtccctcccaagataggatgttgacaatgttataatctgatcactggggcccactttgctatccttgaggccccttctcttggtgctttcatttctcctgagcaaaatgtagttgtcaacacacagcattcagaaggcccttggtgtagaaggttacagcctctttcatttgactttaggaacattaagttacaaaattgtttcttgatgtcactgtcaggagcacacatagatgctcctcattctgtagctgtgcactttgtgagcacatagataaattcagtaacagctggaacatctcagggatgagggaaaaggttgcttggggaactgaggcagggccaggatagaaacatgggtgttgctcagttagaggcagcattgacagtgagatctgaaataaatgctgagctgctaaagcctaatgtggatgcacagccaaagttgaagccttctggtccttcataaagaactatagaaggggggtttgggaaaggacagcatggagagtgtctagtcagagatctgaagcagtagaaatagctcttctctgtttctcatggatgtttctgattggtgccatctattcatcctcaaggggaaagatcagaaccccgtcaccaagggacttcccttctcagctgtgctctgctccccattgccctcacacttgtccttttcttctctcctctaccacagaagatggtctgaactggcaagttatacttagtggggaatgctatggagctggtcacaccgccctcttaaataacgaattggactgtggaagctggcatctccatagctactccagaaggagagtttgtgttggggaatgttgtgatttaaccagaacgtggctcctgtgcttttgtgttttatgtttggggctgcattagcttttggaggtggggctaggatgctgaccattatctctaaaagaaggcacttctagtctcactaaacaagactccaaccattctacaatgtgtctgtcttaggctgctgggaattaggatgtctgctctaagaacttgatctgtgatttgtaagtaaacgtataaaagtaccaggagctacttatgtagcctgagaatgggctctatgctggcccaaacacttatacaaaggattgtttctccattcctaatccactgaaaagaagctagtggacagaaaaatggctcctcttcaactggaaaacttggtaaagtatattttaaaatataaaagttgtgaattacagcagatcccctgtgctcttgtaaagtgttgcctttaatcgtgaaggatcaattattgccatatatactcccctccttacatcgctactgtagtttcccctccctcctctgctcccagctccttcccccacctcccttctaccccttcctcccaaccatgactcctctgtttctcttcagaaaaggacaggcctcccctatggatatcaacaatacagcatacatatcaagttgtagtaagtaataccccttgtattaaggccagatgaggcaacccagtaggagagggtgtcccaaaagcaggcagattcagagatagcccttactcccactattaggaatcccacaagaaaaccaagctacacaagctgtacaacatatatgcataggacctaggtcagttccataccagctcctggttctctattcagtggctgtaagccccagtaaacccaggtttgttgattttgtgggttttcttgttatcctctcccttttaatatcagtccagacatggccccagaattgccaaaagaaaggacttggcaccaaaattctcttcaaaaggatgagaaagtcaagcttgctttgaagttctgcccttgttcagtttctatttgcggctggtagggggaggggcacaccaagaaagttttaaatggattctacaccaaaccatcccttagcatgggcaccatcagcaagccctgctctaggtttgcttctgccaagcccatggcagagattcccaatgagcagagagagtctcactatgagtatagcagaaggccaataccctgccttgccttgaggatcaccacaacatcacagctacacaaactacagataatccaggaggcgcagtaccaaactgaagcatcacgccatctctcctgaaaataaataaatttaaaaaatcaactttgcccgttgacaacttttattttgataatatgttatctttccaccacatactatgttcagctttaggaactactgagctattctgatatattacttcagggatgatatgacagttcaaaactcatggctaatgttcacacatttcctcccaagttcttcgaccctacttgggccacactaaaatatggccaatgcagagctcccacttgagtaggaatcctttgcacaaaaggagggtgaggctcacaaatgcactcaggcacttgattcttttagcaccatcgacatgcaatcaatgcataccacaaatatgagatgcacatgttgaagctatacgtgctgaaaatgaaaccaaaaacttttattttaattacatatttgcttaactcaatctaccagaatagtatcgataatataacaaaggttattcatgtaaaatatttgcccattctacctaattatttttctcatattctcaaatacagcagcaacccatcattttcctcccgttttttcactcagaatagcaagaactgttttctgcgttcctgaaagtgagtcagacctctggacagcaaggagaagccttcacggccacagctggtggaaccccggtcaattctgcagctctctggcaaagctggaagctggagcttaggaaatctagaatcggtagtgaactcctaatggcattccccaccccaggttatgaacggagaagaattgcttcttccttctaggatgtcagtctaggacctcccaaattcaggaaataaaactcttaaaatggaaaataaatccccaataccctaaagtaaagtcaagttcagcctcatgtatcattactgttacacccgaaagactcggagtctgagtgtttacttttacctcaattcattattttctccatgacctccaagacatttaatatgattcccataatgcagacgagtcaagtaacttcctcccgggcctacagtgagggaaccacagagctggggtgggaagtcagaagccccgagaccactatgtattagtagcaataatgtccagaagaaattcctcctttcaggagaaacacgagaggagatccaaccatgctttcacaagagaattttagcagtattataaatatttggaccaccttgtctctttataccaacttattagttttaaaaataaatcagtagggatttttttttcctccgtgttatttcagtcatgttccattttccctcagtcctgctacatgtaaccctgggactgagattttaggagattgctctagtaaatgctagtttatatcaagatacaatcggattacccctcacataaaacctttatgtgatgcccataaaatatttctttagtgattagaaaagcatatggtgtttaggaaatgacattactttgactgcccagtatgaaatcacgcatgagaccaacaacatagaccaaactgtttattcactaaatgagcagcatataaattaactcctcgtgtcaatcagttattgtcatcatttcacagtgataaatagaaactctttttcttccagaaaaggaacagactgcgggaaacaataagccctccagccttgtctcagatcctgcttgtgtctccatttcccacccacattcactcactttctcagcccttggctaactgtggttagtttctgatcattttaaactgttctccacatgccattaggataaagtgcttatgccttttattcagttctgaaatttcaagagcctaccattggctgaatctaaaaatatctttatcttcacaaattctccatggttagaatttctaagtaaatctgattagtggaaatctgatctttacactatagaaaatgttgaagtaaacaatcctggagtttcctgttcattcctgctgtttcttgtgtaaaatgtcatgtaaatgaatggtgaaagtcttgtatgaaattagccaatcacgaggatatgaactataaaagttcaggtagtgagtaaaaaaacaaaaaagccagtctatgatggctcatacctctaatcccagcactcaggaggcaaaagtaggtggatctctgagttcaaggccaacccctctacagagctagttccaggacatcctgggttactcagagaatccttgtctcaaaaaacaaaaacaaaagaagctcagatagagataaaagagaaatttacacatctctgggtgtccacatggaactgattgtgatgatatagaagtgaatgcttgtgaacaactggaatgccctttgtcattgagacatcattagtgatgtgtttgacaattgttggcagcatttaaatgcacatttccttttaagagaacattcctttgtgtgagtgatttcaattggtatcttttacttcaccaatttgctaatgtcccatggtgcctgtaagtaaaagcacagataggatggttttgatatgcagtatgcatgaagcatcatctgtttcccaacacagaatttgagctttataactacaccttcagttaagtggatcttcactgttgtttcaggccagttcttctgctcaacaaacaaacaaacaaaccaatcaatagcccctcacagtatgaacttaaaaacaagtcaacaccatgattcaggaatgtagtcaacagttccttttccaggtagaggcttaaccccagttaatctgcaacttgttctacttgcttggcctctcctgtcccctgctttgagtttctgaccaacagtcctcatccagatctcgaacctaagtcttctgtatctcaacctaagtctactgcatcttaacctgtctactgcatctcaactaagtctactgcatctcaactaagtctactgcatctcaactaagtctactgcatctcaactaagtctactgcatctcaactaccatcactgggcttcactaagctacctacacttttctgacagcattttgctccctaaaagtgttccataaattaaaaccagagttaggcattctgaaattaggacgtgtgtgatgaatagggcctgaaaaggggaaagaggacctagggaaggctgagactccctgtgctgatttctgctccgtggatggtgcatgtggtgctgcccaggctgtgaccgagcttgctgtctctgtcagtcaggaagctgaaggcagggaaatctccagtgtagcagggagaaccagggaaaagtctcagacccagcgggcagagtcagcaggtgaagaaaggcttctattagaggtgaggaagcacacagagaaagccgattcacagaaaagaggctctgcaaagcaccggggagctggggcgctgaagctccctctcccagaggctgggtttaagggtctgtgaaggaatttcctcctctaatctagtgtttgttagtttggacagagacagggaggctggtccttccacaagtctggcgtaaacatgtccagctccagccttgaacttgtctagctggtccttcagaatgtgcatgtggggaaagacaagtctttaggcctttgtcttcagtcatgtttatgaagaaaaagctggaagtttgctaaccttacttactatctatttgtgactcctttccctgtctgtctacctatcagagacctgcctgactccctcctagcctctcacatagatcactccaaaagtcacctgcagactaggattagaggactctgagtggatggctcatactggccatcatttccttagagctctagatgttagcactcggccttcatttcagttcccagatgtacagtgccaaggccatgatcattctggagccataatgataccccagttgttcttatgatgtagcatagacatcaggtcagtttccatgtaccatagacatgtttaggaagaaaaaaaaatttttaaagcatggtcccatcccccccccaaaaaattttttttaatttaattgtggaaagcctgcagttaggacaccacaatatcattcagaaggtggaagaactcagcaagtgctgcctgcaagttagctgacgggaagtattgataagaaaaaaaagtcacaggttttccatctctaaacagaagagtgagagccacaggccttcatcaaacccttcaacaaaagtgtctgcatacatcgtgtccaagtagtcacctgtgaatctcacatgaagctttagcctttctaaggaggtatcagaatagtgtctagggactggcattgaagctggagccctacctcagcagtctgattccatatacaaagtaactactctttaaaccttggcttctcctctctaaaaggagtctgcattccatggggaggttttaagccccccaaagtccatgccttggccaagactgaataagtcaaagaagcaatgcaactgaatgtattaagtctctcctggggatttcacagatgagcccaataaagtgctgatacccacttagtatcagataaaatatagggaagtagtttaaatgacagtccctggccactgccaagatgaaactttccatggatgcttgcctcggacatggctgaaacagaagatggccatctgtgccaccagatatgtgtctcacctctgttgtctttgcaaaacctgttgtaggggtggagctcaagcagttagctcacgtaacacattagactagcacctggtatccttctcacagcaagtatattggtactgtatgccagaaggcccatgtgttcccaccaatctctgaatttgaactttagaacgtcaccaatatatcactcagtaattcctgtgtctcccatatgtcagctgtttgttaagaaccaagggtgatctctggggaaggagtaagttcacctgcatggagattcacactttcagtttggaggcaggtgatggtgatgggtttttagtttgtttgtttttttgttttttttttttttgttttgttttttttatgtttagctcagtcaagagcatttccaagaggagactcatgagaaatccagccaaggccggtatacctgtcaggatgcagaagagggagggggaatgatagggtctgttctgtggcctttattagggtttctacaggaaagacatgtcaagataaaaggattatgattggcaaacttgtataattgtggcaggttgtcagccacaggtctgtccttggttgactggtaacagagctctggaccatgaaggaggagaacattactatgggttatgggctccgtagatgaggtaggtctcagaactaactggttagtaatgtgtatagcaaagacatactccctgttgagtcctttgttggttgcagtaattactcattccaagaaggggcatctccccagacacagacttttagatatctaaacctcagaatagagttgggagtaaagctcagtggtagaatgcatgccaagcacaagtgaggcactaagttcaagactgagcaaggccaagaaaaacattcacatcataaaatatcataatataaaaaaattatagttacatgagcattgaatgaatgtacttagtggcactaaattgtgcacctgaaagtgctaaaatgggctgggtgtgatggcacatgcctttaatcccagcacttgggaggcagaggcaagtgggtttctgagttcgaggccagcctggtctacaaaatgagttccaggacagccagggctacacagagaaaccctgtctcgaagaaaacaacaacaacaacaacaaagtgctaaaatgggctctgtgcccacagctgatcctgtgccacatacccaaatactgccaggagagagctggtctccaaggagtgccgacacacctgtgagcacaggtaagaccaccacttctgttcaaattcctggtccaagagggactctttcagagccatcaggacaaggaacagccagggacaggatctttctggtttctatctgcaccctggagctgaccctataccacagctctccatacccaaattcctcccagaaagaactggtctcccaggagtactgacacaggcttgcaggagggacaagccacacagtcagagacagcaagaccagctaacatcagagataatcagatggcaagaggcaagggcaagaatataaacaacagaaatcaaggctatttggcatcatcagaacccagttctcccaccatagcaagtcctggatatcccaacacacaaaaaaagcaagactctgatttaaaatcacatttcaagattatgatagagaactttaagaaggacataagtaactcccttaaagaaatactggagaacacggttaaacaggtagaagccctaaaagaagaaacacaaaaatcccttaaagaattacaggaaaacacaaccaaacaggtaaaggaattgaacaaaaccatccaggatctaaaaatggaaatagaaccaataaaaaagaatcacaaaggaagacagccctggaaatagaaaacctagaaaagaggtcaggagtcatagatgcaagcattatcaacaaaatacaagagatagaagagagagcctcaggtgcagaagataccatagagaacattgatacaacactcaaagaaaatgcaaaatgtacaaagctcctaacccaaaacatccaggaaattcaggacacaatgagaagaccaaacctaaggataataggtatagaagagaatgaagattcccaattttaagggccagtaaatatcttcaacaaaattatagaagaaaacttccctatcctaaagaaagagatgcccatgaacatctacaagaagcctacagaactccaaatagattggccagaaaagaaattcctcctgtcacctaatagtcaaaacaccaaatgcactaaataaagaactaatattaaaagcagtgaggggaaaaggtcaaataatatataaaggcagacctgtcagaattacaccagacttatcaccagagactatgaaagctagaagatcctgggcagatgtaatacagaccctaagagaacacaaatgccagcccaggctactatacccagcaaaactctcaattaccatagatggagaaaccaagatattccatgacaaaaagaaatttacacaagatctttacacaaacccagtccttcaagggataataaatggaaaactccaacacaaggagtttaactacagcctagaaaaaggaagaaaataatctttttttttaaacaaacccaaaagaagatagcctcacaaacataaaaataaaataaaaaataacaggaagcaacagtcactatttcttaatatctcttaatatcaatggactcagttccccaatgaaagtcctaaaatggtatgtttttatgttatgtggatttcagcaaaacttaaaataacattgaatccagactgcacaacagcaatcatataaattccagtaagaaaattttaaaagtgaaggagaggcagaagacaaagctcccatcaaaagcctagagtgttaaaggtgtctgaagtcaacctctctttgaaatgtaaaagaattgaatcatctcctacaaagtattgactaccctctaaaatgcatattttaggcaattctaaaacttgcccaccatagtggataaaagagaaaagaaacagcacagaatttctccatctttgagccaattctcacatctcactatcctgttacactctacaagattagaaacaatgatgtaggttatcctgtgctgcaaacctggctcattttcatgggtggagctgggaggctgaggatgctgaaccccatcctcggagcttgctttgcatgctcaactcaccattactgtctcccctgataaattggatcggagacagctatgggtttttctacaacagagtgttattatctgtgcatacggtgtgtgtgtgtgtgggggggggggtgtgtgttttaatctatcagaattatgcacactattactgaatggttccctcaaaactcccctcctgaacacatcatactgaacattttgcatccaacataatgtaacagactagaagactgttgtcccattgcattgcattacacagccccacctaacccttctctgagctctggaaagcccacagtcaattcttctttttccttactcatctgccaactcttttctccactcattatgccaagattctctggcataaacacctctggctgccaaacctttctgctattgtcttaacataagcagcccaaagatgactgcctttctctctccctacaatttgtttagcacatccagttcccagatgctgtggagggagtaccagggtaaagggaagagattattttgggaaaagagtgttggggaagaattggatagtttccctaagtcacagacaaggccagaaggtccctggagcattaagaataagtgtgttagttaaatgatgaggtgtgatccacatttggactcctttctgtaggctggaatgaagaatcatggctcccaagtatgtactgttccctgaccaaatcgctgcattgagtcagatgagaataccaataccagtttgaaaatcctggtctacatataaggatttatattcacttcccagagtttaggacaccattctgaaaggctgtggtgtaattctgacctgggtataacaccaagtgaatgttgtactagcattagaagtcatgagcttgtactcttactaggccacaaaacagccttaggtccacggcaagttccctgagtctttgctgcccctgtgttctcactggtgaaatgaggtcacaactcacttactttgtaaagcaccgattatatgcgcactgttgaagcaactaacatgttgcttaagacgagcatgtgaagtagatgtgatatcaccttcttttacacactcacaagtttcttgtccatgataccaaagttacacacagagttaaatttaagccccaccgctgtgatactcagaacctgtcctccaactaatgtgctttgttgctctcttgtagaaccgtcaggtcaggtatttgggaatgtaaaaatgttcttaacattcccagaacttacttcttcatctgttacacttctcattaggacctggcacatttcacaacacacatatcaggtaaataatagctactaatactaccactgctggtattattaaaatactctatttgtcaaggcatggtggctcacacctgtaatcctatttggggggtagggggttataggcagatcgtgtgtttgaagacagtttggattatataatgagaccatctgaggggaaaacagattctattctagatgccatctccctccattcccaatgacaagactgaaagttttgtgagatgttaacattaatgccaaccttagaatgcatgctttcttaaagttcatgggaaaatgatgatgatttgtgtagaagatttcttgccacccaccctttcattgccactagaaacaacagagtatctaaactggcttgttcacagtgtagacctaacattgttttcctctctgcttctttcagatctttgcctacatggatgaaacctcttccctaaaggaaaagtgggacctccgagctcttcggtttttatcagttaactctataattgacccttgggtctttgccatacttaggccaccggtcctgaggttaatgcgctcagtcctctgttgtcggacttcactgagaacacaagaagctcagcaaacatcctgttctacccagtccagtgccagtaaacagactgacctttgtggacagttgtgaggatgcgcttcacgagggaacctctgaagaagtctttaaatggcctcattggagaagtgtaaggggctggaatataaacagaataaccttgccctgagaagcagatgaaacagactttatgaggtttgggctgcagatgtgatgacagagccctttgtggaaagtgtcagaggatataaagttcacattatgtgacctttgaaggacaatctgctgcgtcgaagacccagttgatttaagctttcctgttgagtgacaaagcatgtggttttgtaatttgttttaaaatgctacatggttactgttttaattttgatgtcactgctgttataaatgcagtcagaccaaatgaaattcattctctaggaagtcaactcatgcaagcgatgaagcaaccagagcagacaagttgctgtctcgtgattgcttaatggactctttatttggaccatgaagttgaatgccattggccccttttactgtgcgcgttcatgtgggagtcctctctggtaacgaaaggatgcactgatttggttaatgctagttaatcctttaggagctctgtcatgttgtcagattatttattctgtcttgtctattgtgataaggctactgaagaaaacttcagaaatttgcgtctcacaaaggaataattaaaaaaatcaattttaattagtgttcttcagtttttttatagaggaagagttttcacagttgtatctgagatcagattttaggatcaaactctgaaaattcaagtctatttttcaggttctctagaatccttctagtgttggtactagacataactaacatacacatacactacaagatgtttgattgtgccacggcaaacgcttttgtctgtatttttattgagggaacatattttgattcatacaacagaagaaatcatgtaactgtgagtcatatcttatatttccaaacgtttggcatggtataaactcagcattaaagtattccagtgagcgtgtacatttagtcagttatagtgtaaacacatctgaaatgttacaagctaaattataaaacaaaaaagtagaagtcttcaatgaattaactccccaaggacagtttgcagttaatgtagacatggcatcttttaggtaaaataaaagtttttaaaaaatcaaataatattttggcaaatttttaaaatgtacagttgttataaattaaaattttaagatatccagtggagttcttgatattgaaagagagttttgctatcagttttcactcttctgacatggtcattagaataatataaccatcgtatttgagagcagatagaattgtaggatggctgttaactttttaaatttagttgtttctcatgcttcatgtttacccagagctgttttttatagttagttatcatttagaaagactctgtgtaactaaatatctctgatacaaattatgggagtcaaagcagctcttacttttacaagaatatataaataagtggttcgtgtttgtataaatttaagcagagcagacaaagtttaatttaactaaaatctaggcaggtataaataaatgccacctcttcacccggtgttgcatgccaagaaattacattcagggggagaatgacactgaagcagaaatttctggttactttgcacctggaattttgattccttttatcagatgtcgttgtaaaaatctcagaatgaaaaaaaatattaactacagcctctcattgcaccacactgtgcccctgcacccattgagaacaatgcctgagattttttaaaatggacatagtaccctcaggagcataaaatatcagaactgaagctgctttatctatttatttatttccattattatggccaactctaatcatggcatacacacttttttcatgcctgcatgtgtgtgtgtgtgtgtgtgtgtgtgtgtgtgtgtgtgtgtgtgcatgtgtgtaaaggcctcaggtttatgggtcttctacttcattcattcagatagtatctttcaatcaaatgaagagctcaccaatatgatgagtctagctagccagcttgctctggaggtcctctgtctctgcctacccagcgattatgtggaatctaaatatccaaaccctaatcctcaagtttcaagttttcataaacgggctgtaaccactgagccatttcctcaattctattaagccattatttaagaactagtcagtctctaggattccactttcttatgtgcttttgttccttgtatgttgatgactaaattttgttgcttcatttgcaccaatttatacatagaagaaactgaatgccaaaactctctctctaacaatcacctattgtttgtggcatttcaaaggcaacttagaaaacaaaatgcctggaaggtatgtaaccatttcctccttatagaccctgtcctagcagccaagcttgttttagttgcattttccaggtagatgagagaaagccattacatagtatacattacatattacagggctgagtttgaaaaaaagagaatctgattgtgttctttgcttccaactgttgttgctgtgaaaagggagaaaacgggcaagtgaatactcatctgagaatgccagccctaagttagcacgtcctggaatggaacccagttgtctgttctgtactaggccatttctagatgattcagtgaaaccccactcacctttccacgaaagacttggaaagtgctgctgttaagttggagccttggctctctagagatctgatagagaaccaagtttgctgtcaagtccatagaagacctgaatgtcaagaactttataagcaagacaaccactgtacagccccatgctctagaaactaccatcctcaaaccatagaacccaaacaacctacagcctgccccatgctctataaacatccatctccaaaccacccaagctggcataggaggccaatccatcccaccctgtgctcagcatcacttgttaaatttcaacattctcctcctaatgtcagtgcactttcagagagattgaccttatgttagagtcaagacagctctgatttggacttggactaagaaaaacaacacactctggcttagaatttgataacttaactttgaaaggcagaggagaacaattagctctcacttgggacaagactgtttatttcacttagctaagccaaatctaatggttttctagtcttgggcagggctcccacttgggccactcactgagatgcattgccctgtgcaaatgaacatttcttcttgaagggtcatgagcctggtgcttctcatttggagggattagcaaagttccttcctttcccttgtatgtcctctttgagtgcacttgtgacatacagccaatcactcagccgcattatgataggcctaaaaaccatttatcagtgggtctggtgacacataccttaaatcccagcactcaagagacagagctagaggaatgcttgatttaaagccagctgggtctacatatcaagttctaggccaaccagggctacatagtgagaccctgtctcaaaaaccaacaaaacaaagcaaaacaaaagccattcagccacatgaaagactaggggaaggagtattattttagcaactcacaaaagctacaaatccaatttccatagagccgaaggctatgtgtcagacagcgctgttttcacactcctttctaaatctgttaacttaggtgaattgaaaaaagtgatataaattccccttttgagttgtggttttattttctgtacaatatttgtgttactaaaggtcaatcttagcaatctgagtctgcaatccatgtatgtcacatgtggaaactttacaaaatcaagtaagacagtgatgattcaggtaggaaatgatgacacattcagggggtagaggaggaatgtttaataaaaggaatatttacagagagtgaggggatgggggaggaggccttcaaagctgtccctcctcctacgcctggggtaacaagggaggaacagttactggaactcaatgaaagatgtagaagatgccatccaataggagtcatgactcagaaaggggaaacagccactgccaagccacagggtgagaaggagttcttctgcccctcccttccaccaggcaaacctagttgtagtctacaacagaagaggacccaggctgtgcaccgatgaagcacagaatgctagatctagaggggaaaacggaaactagccaccacgagtagatcaacagtttgcattgggaagttctgcttcttgccttctaaactccaaatagatattcctcagcaagtgtggcacacagggagctgccctatttacagagagagagataaaatataatagatctcccttacaaatttacttgccctagactctagatactagtttagaatttaggtcttatttttgagaagggcctctggtatcagaaaaacctaactaggggcaggacatatctcccaaaacacaagttagatatgcctacagagccagcataaagagcatttgaagccatgtctaaacacgaataagaaacataagaaaactgacatacctgtaacttgcccaacactggagagtctgcagcctgagctaccttgtgggaatccagctccgacgtgagggggaaacaaagaatgaggttaaggaacaggacagacagggcagagattttaacaatacagaaaaaaaaaatcagcaaattacagcttccaggagcagctgccaacatggttgatcctgctacacagccttcaccttcatttcttcactcatctccccttttatctccctacttttgtgacatagtcaaattacatagcccagactggcctctaactccaggccctcctgtcccactttctagaatgctgatgtcacaggcatgtaacagcacacagcctccttcttgagtgtatttttcctggcatggattctgctactctctctctctctctctctctctctctctctctctctctctctctctctctctctctctgtgtgtctcctattacatacacatcttgttttctttgatgcacatgcaaactctagtagatctgtagattttttttcagacttccaaagttttcccagacaagttacttcattgctcagagtcccagtttcctcacctctaaaatgagagtaacatcatctacctgccaattttttgagtttccaggacatttagcactatgcctggatgcggtaaatgttaggaaggttagggccagtgtttttctagatgctcagtttagagttcattctgacatcacacacacacacacacacacacacacacacacacgcacacacacacctggctgtactctctgacccttggaagttgtgatggttagaataattctgtgcctgttcctctatcaggtaacaaccagaaaccatgacaatggtatttcagagagtcaaatgctgattcgtctacttgtacaacacaagggatttgtaagtgtaaaaagaaagggccaagagagacaaaaggatgactgaaaacacacctcccctccgggtgaccacttccacatctggcctagctacgatgctaggccaaagccaaacgccaagaaatttaagggggggggggggggagaaagtacctatcagtgagagttttcatatgtggacttctggcttaattttaacattatgtttctactgatattttcttggaaacaaagtcataccttagaatcctcagcaactaaaagaagtgtgagtgccacgctttgcacagtaggaagctgggtgtgcagggttaggttaggaggccatcaagggcgtcctagttagagttactattgctatgatgaaacagcagcaccaaagcacatagagaaagaaaagatgtactggtcttacactttcttatttagaggaagtcaggtcagaaactcaagcagggcaggagcccaggagccataagctgttgcagaggctatggaaggatgctgctctgcatgcagttgaggatcatcagcctagggatgataccacacacaatggacatggacctcccaacaatcactatttgagaaaatgccctacaggtttgccttcagtcagatcttatagagctacatcttatgcaggccttttcttaaggttcccttctctcaaatgactttagcttgtgtcaagctgacataaaacaaaccagcacagccagcagaatgaatggaagtatgcagcaacctgggggtggggttggggagaggtcctctagaatgtaccagggacatgagagtctcttgggactcaaagaggtggggggaaccttagatgaaatgtccaatagtagagagagggaacttgtacagtccatctcctgaagaaagatggggcatcaagtggagggatggggttgccatcccacagtcaaaagctctgaccaagaattgttcctgtctaaagaactgcagagacaaaaatggtgaagagtctgagggaaaggaggtccagtgactggcccaacttgggatccatctcaagaggaggccccaaggcctgacactattactgatgctatagtgtacttacatacaggagcctggcatggctgacctccaagaggcccaacaagcaactgactgagacagaggcagatacttacacccaaccaatgaactgaagtcgagattcctgtggttgaattagggaaaggctggaagaagccgaggaggaggactaccccataggaagaccagcactgtcaactcacctgacccctgagatctttgagacactgtgccactaaccaggcaacatacaagagctagtctggggcccccaacacatatagaacagaggactgcttcatctggcctcaatgagagaagatgcatctaaccctggagggacttgaggccccagggagcagagaggcctagtgggagggggacatcctcttggagacagggggaggaggaatgggatgaggaactgtgggaaggcaaaccaggagggcagtggggggcaggcggtaatgactgaactgtaaaaaaataaataaaagtaattttaaagaaaacaagccagcacagaagacatccttcaagttgcccgtgtgattatggttctgatcaaagtcttgtctgcaaccacatgaaccacctgtttttggttttgttttttcctctttttgtttttttgtttttttgtttttttggttttttggttttttgtttttttggttttttttttttttttttttttttttttttgcttggctctgtacactagtgaagcgggtaggtgggccccataggattattaatagatcctgatctttcatgttagctacttagttcttatgtggtatcagtgctggatataacccataaatgaacagtctcttggaaatgagactccttggctcctacttatcaaatgacatcttgactagaaataactagcagatactcatctcagctctaagggtgtgcatgataaatccagcttttaaaaactacaacagctgtacagccaagtctttgaagatatagttgagactatctttcagctctatgagagtgtctcagtatttccacactgcaaagagtttagagaagccagccaaaaagtccctgacttttgcaaacacaggttcatttttctgttcttaaaaataaatgccctggtgttacttgagacacggtaaccagaacactatgggctgcatactgtggtgtgctactctctggcctgtaaaaataaatctcgtgtaagtattcttccgataaaagaagagtgaatcggtctaagtataaacgaggtatctttagtcactttacctcctattatggtgatgggggagttgaactcccactctgagaggaaacaccaactcagatgttcatgtctttccatgacacattggttggaaacagcaaggaaagtgaagaagtagacactgatcaccttttacaattttctttccagttctggagatcaacaccagagattcatggtctaagcaagcactggaccactgagaaacagcccccttctaagattctcttctgtgtttttctacaatgttacagtgatacatgatggttccagtgacatagcatgttggaaacatgattatttcattatcagtattaatggcatcttcaaacaataaagtcctacattcagtttatctattgaatgcattaagacaatgctaaataggtatcttataatagaaatcttaagcaggaaagccatcaccctgggagaggcatagtggtattctatgcagaacacactgaaaggttaatccagaaagctgagctggggatggactgtgggggagaaggctcaggtaactttgctctgcatcatccctcactctcacctccttcccctctcacctccctccctgttccatctccttccaaaagtcaccagtcacctttacatctgtgcaacacaccttgaaaccctctgggtcaaggtcaatgccgtggctgttttctcaactgggaaaagcatcttttcctctggacagccatggtctgctttccaactttcttatctcctccaacattctgccccatagagaccttctgcaaatacccttcctaaaattgtaccccactatggcctcaaactcactgtacatttggagatgactttggacttctgatgctcctgtccatgccttccgaatgctggggttacaggtatgtgccactgtatccagctctacacagggctggagatggagccccggttatgtgcatgcaagtaaacacaatagctgcagcctgatgtgctcccctttaaaacaagaagcaagccaggaagtccctctaagcatactgtgaaaaggatttgacgccatgctttaagtgttgtggatattggatctcaaccctcagaatagcactgtaaggtgtgtgcattctccattttacagatggtgaaagaaagataattcaatcaaacaactaacccaggagctcatccctttaaccccaaagcattagagccagcttctggtccaaggctcagaaagtattctactgactccatctaccatagccctctctttctcactgtatttctggaatagaaacattctggaaatgagcctggcctatctctgtcaaaatagcacctaggatacaatcttaaattgtactatataagatagggcttgttgtggactgggttatcgtaaatgtttttagtgaataaatgaatgaatgctatcaaaagtacaaccactattaatctctttcaaactcaaagtaatacctcctctccttctcttttctttctccctttgtgtgcagagaggaaggcagaccagacctgccactgggggatgaaagaactcaggagaggaggaacccatgcagggagcctgacagtgtggcagagcccacacaggatacagatgggtctagacacaggagtgctgtggtggtggtggtggtgataataggtaaccacaatggacatatgacagcataagccaatagaaaaggcttcgctgtggtatcagagcctgaagaataaggagattacccacatagttactcattgtaaggagccaggcctaaatggagtgagtgggatggcatcaggacatagaaacctaaaagaaagaggtcccttagtcagagatgaggctagcttcaggtgaaaagggagagttctgcacaggggtgaaattggtataggaactcagaagccatgtgagggtaaagcgttttgctacgactgggcttgtaaacctgagcaaggttaaaggtcccctgtcagaagcctgccactggccatcaggacatgagaatggtgcctgtgtagggtaattaggggccaaccacatgagcaggaagaaggtggtgtggacaagaatgaccgcaaggtggtgagagattggtcatgtagctggaccgaacaaataagcgaacgtatgaagaacagagagcagatgtcacagatgaagacaggaaataagaatgaatagtgtaggtattggttagttcatattgttgttccacttttagggttgcagtccccttcagctccttgggtgctttctctagcttctccattgggggccctgtgtaccatcttatagatgactgtgagcatccacttctgtatttgccaggtactggcatagcctcatacgagacagctataacagggtcccttcagcaaaatctttcttgcatatgcaatagtgtttcatatctctagctgcatatgtagcagaagatggcctagtcggccatcactgggaagagaggccccttagtattgcaaactttatatgccccagtacaggggaatgccagggccaagaagcgggagtgggtgggtaggggagcagggcagggggagggtatagggagggtatagggaactttcgggatagcatctgaaatgtatataaagaaaatatctaataagagagaaagagagagagagagagagagagagagagagagaaagagagagagagagagagagaggaagagagggagggatggagggagggagggagagagagagagagagagagagagagagagagagagagagagagagagaatagtgtggagctgggctggaagcaggagcttgattctagcttgtattttttcaaaatacagaaatacacat

SEQ ID NO: 1733 - DNA, 2121 bp, Mus musculus
cctgcctggccccacggcagcagctcgcaagcaatctaaattgctttcctggattccactactggacttgccccctgaaggcgctggagggagcagctgctctggcaagcaccccctgctagggcaggtgaggcacagaagcaccgagagcgaccggatattgtagtgaagaggccactgtacgtacaggcaggagacccaaacaagtctgtccttggtgcgagttgggggccggaagggagctctggatttcggtccctccccttttccctgctctgtcttggagccctggggccatcagaccctccgactgtctggtacttgcctggaagagatatcatctctcctccacaccctccaccatggacaattttcttaatgactccaagctaatggaggactgcaagagtcgtcagtggctcctttcgggggaaagcccagccatcagctcggtgatgttctcggccggggttctggggaatctcatcgcactggcactgttggcgcgccgctggcgtggggacaccgggtgtagcgccggcagcaggacctctatctccttgtttcacgtgctggtaacggaattggtgctcactgacctgctgggaacctgcctcatcagcccggtggtgctggcttcatattcaagaaaccagaccctggtggccctggctcccgaaagtcacgcgtgtacctatttcgctttcactatgaccttctttagtctggccacgatgctcatgctcttcgctatggccctggaacgctacctctccatcgggtacccttacttctacaggcgccacttatcgcgccgcgggggtctggcggtgctgcctgtcatctatggggcctccttgctcttctgttccctgccgctgctcaactacggggagtacgtccagtactgtcctgggacatggtgctttatccggcacgggaggactgcataccttcagctgtacgccacgatgctcctgctgcttatcgtggctgtgctcgcctgcaacatcagcgttatcctcaacctcattcgcatgcaccgtcggagcagaagaagccgctgcggattgtctggcagtagcctaagaggccctggatctcgcaggagaggagagaggacttcgatggcagaggagacggaccacctcattctcctggccattatgaccatcaccttcgccatatgctccttgcctttcacaatctttgcctacatggatgaaacctcttccctaaaggaaaagtgggacctccgagctcttcggtttttatcagttaactctataattgacccttgggtctttgccatacttaggccaccggtcctgaggttaatgcgctcagtcctctgttgtcggacttcactgagaacacaagaagctcagcaaacatcctgttctacccagtccagtgccagtaaacagactgacctttgtggacagttgtgaggatgcgcttcacgagggaacctctgaagaagtctttaaatggcctcattggagaagtgtaaggggctggaatataaacagaataaccttgccctgagaagcagatgaaacagactttatgaggtttgggctgcagatgtgatgacagagccctttgtggaaagtgtcagaggatataaagttcacattatgtgacctttgaaggacaatctgctgcgtcgaagacccagttgatttaagctttcctgttgagtgacaaagcatgtggttttgtaatttgttttaaaatgctacatggttactgttttaattttgatgtcactgctgttataaatgcagtcagaccaaatgaaattcattctctaggaagtcaactcatgcaagcgatgaagcaaccagagcagacaagttgctgtctcgtgattgcttaatggactctttatttggaccatgaagttgaatgccattggccccttttactgtgcgcgttcatgtgggagtcctctctggtaacgaaaggatgcactgatttggttaatgctagttaatcctttaggagctctgtcatgttgtcagattatttattctgtcttgtctattgtgataaggctactgaagaaaacttcagaaatttgcgtctcacaaaggaataattaaaaaaatcaatttt

SEQ ID NO: 1734 - protein, 358 aa, Mus musculus
MDNFLNDSKLMEDCKSRQWLLSGESPAISSVMFSAGVLGNLIALLARRWRGDTGCSAGSRTSISLFHVLVTELVLTDLLGTCLISPVVLASYSRNQTLVAPESHACTYFAFTMTFFSLATMLMLFAMALERYLSIGYPYFYRRHLSRRGGLAVLPVIYGASLLFCSLPLLNYGEYVQYCPGTWCFIRHGRTAYLQLYATMLLLLIVAVLACNISVILNLIRMHRRSRRSRCGLSGSSLRGPGSRRRGERTSMAEETDHLILLAIMTITFAICSLPFTIFAYMDETSSLKEKWDLRALRFLSVNSIIDPWVFAILRPPVLRLMRSVLCCRTSLRTQEAQQTSCSTQSSASKQTDLCGQL

SEQ ID NO: 1735 - DNA, 35097 bp, Homo sapiens
cacaaaaagagctctcagcagggtcccagtgtacgtacattctacaaaagtcaaggccagttatctgcactcatcttattagaccttccagcagcactggccaagtctcccactccgtccttcattcattcaacacatctgtattgagcacttactctatgccaggcactgttttaatccttgtggtacaacaatcatttaaaatgacaaagattcctgccctctggagacttatatcccagcagggggaaacagttaacaaacaaaaaacaataaataactagattacatggtatgttagaaggcaataagggctatgggaaggagaaaacatagaactcagcaatagccttgaagagtttccctttcagcacataattatccctataacgaaacacaccctctgtgacaatatttgatatcaagtcaaattacagaatacatctctacatcctcacataataaaaatgaatcacattttcatctgctatctttctgaagtcagtgctctcctctctcctaattctcctggatttgatgtgaggacactggagaaaacacagaaggaacagctgaaactcgagaagggagagtggggatttggtatttcccattgcgatactatgtattggatcctgggggcaagtaacagaaatggaagtggcaaacgtccagggtataagctgactccttttttgccctttttccaattatgtcaagtgatagctactttctcacagtagagagtgagtcagaaattcaaagtatgataaatggtccagaagtgaaattctctgtgggttaatactttttgttttcatgtgaaagaaaataaagctattgtgtaaatataataattatggtaagcattgattttatactaggaatggcagattatttgcaaaaatgactaaaatcattccttcatcgctgtatgcacactgctcccatcaagaggtactgtctgtttccccctccttttatccagtcgggccttgggacttacgttgattagcagaatgtggtggaagtgatggtgtgaaacttccgcatgtgggccttacaacatccactttcacccttttggaacattatgccaccataggagccagcccaagctaacctggtgggaaatgagacaagagctgccagctgaggactcccagacaaaccaatccgcattcaagccaccaggagactacagccgcaagaatgagtccatacaagaccagcacgagaacctcctagctgagtccagaccaacataattgacccactaaacataaaacaataaaataacttggtttcaaaccaattcattttgaagtggcctgttatacagaaataggtagctaatatactaggtattaaatatttattatttattaaaatgataattgttttaacattgagctttgttcctttaataagtagaatttgaataagtaaatttaatgtttatgaaaagagataacagtgaggagtatatactggaacctttttttcaataaaaagtccactagcggccgggcccagtggctcatgcctgtaatcccagcactttgggaggccgaggcgggtggctcatgaggtcaggggatcgagaccattctggctaacgcggtgaaaccccatctctactaaaaaataaaaaaaatcagccgggcgtggtggcatgcccctgtagtcccagctactcgggaggctgaggcaggagaatggcgtgaacccggaaggcggagcttgcagtgagcagagatcacgccactgcactccagcctaggcaacagagcaagactccgtctcaaaaaaaaaaaaaaaaaaaaaaatccactagccctatatcttggtataagtgtttatttttataaaaattaaccacattatacatagtgtttcatgactcacttcatccacttgacattgtagataactacccatgtcaatacatgaagaggtatatttttaagtagttgcataatattccattgaacagatacacatatttgtacgactcccttttgactgacagctgggctagttcccaatattaatgtactatagataatactgaaaggaacttctttatacttacaactttgaatacttactgtttcagcctcagttttctgatctgtaaaatggagatatatctgacccctcctatagaattgttataaagattaatgacactgtgggaggctgaagcaggaggactgcttgaggccaggagtttgagactagcctgggcaacatagtgagaccctgtctctacaaaactgaaaaattagcaaggcatgatagtgcacatctgtagtcccagctactcaggtggttgaggcgggaggatggctggagcccagaagttcaaggctacagtgagctatgattgtgccacttcactcccgcctgggtgacaaaatgagcctctatctctaaaaaaagaaataagatgaatgaaataatgcgtatgaagcccttagcggttttaggaatataacgagcccttaataaactggttttgtcatcactattattataaacttcattagggcacagaccatgtcagcatggtccctcagggcctggcacattataagtgctcaacattaaaacagctgacacccgctgaatgctttctatgggccaggccctgggttcaactggaacttatgaaatattacaggtactgctattatccccatattacagatgaggaaattgaggcacatagaagtgaggtaacttgcttaagaacagagctaaagtttgatttcacagcaatctgactccaaagcccatgctcttaaaactataccatgctgcctcagtaaatatatccccagtaaatacagaaatcaatatgatagatttctagaaatgcaatttctgggtctcaggacatacatattttaaggcttttaaaacatatatgtaaggtaagttattataatgttaagtttttgaaaagcagtaaataaaattttatatgcaatgttatcataactatgaaaaacaatgcacagaagaaaaatggaaggaaactcatcaaaatgttaagagttaccatttctgaaggacaattcatgggtgacttttttccttctattttttttaaattttctatagtgagttgttactttataagaacaaattaaataaccatagctttgcttttggtgttatatgtgttgttctacctcacagttggttctgttcttgaaagcaaacctaagaaaaagaattttcatgattaaatggcactctttatcctctatcaatcttagaaaggaaattagggtcacaggtaatctgccttcctaaaacgagcgtggtaacttgtttgatctaactcctggcgctaataaggagtattgtagatttacctgtctgatatttcctgactgaggacaagagaactgttgtgctcttgcatccatttgcaaagtgctttttattgactcagggttttgcaaagactttatcaaattgtttcacaaacaatcctgtgaggttgtagtgagttccactgaaccttggatacacatacacacctacatgaaagcaaatgtagccggataataatttgacatatcaacctctgtactttttgcccagtacttcctgatactccagagctttcctcagttttagcagcagctagggtgttctctgcttactccctcagagaaagaacaatataacagaccttgaagaacacaggtatcaattcttgactttcaaaagcctaggcttagaggaggcccagatgacagaaaatgaagaatagcaaagtttcaccacttctcccccatctagttcctcagcctgtgaaggagagagggtaaagctcaagagaagaagaagagcttagatgttaacacagagatttgttaaaaaagtggtcctgtactcccaaatctcagagaagtttcagggatctgacatcacagaaaacctatgcctcacttgggtataaacagggtgagcaggagaaaacaatagttccctaagccttacacggtatggaaagagtgagaatatctcccatgaatgcagaagtaatgaggacatggaaagaaatgactagtcatcaagttcactcttctgccaattccaacctgctgtaaattttaattctggaatttccgttgggttctttttagagtttccatttctctactgagattccctacttgtccattgacaatttctctaattctttgaacatatttattaaattcaaaatctgggctatctggaagtcggtttctattgactactttttttttttttttttgacattttggtggactagttaccacctttaggaaaaaggaacttcctggcaatgctagtgtcagaactggattaagcaatgacattcggggatgacaataatctaatgtcgaagtagttgcttgaggtgaaggaaggtattattttgatagaaacgacacatcatatgtaatggtttccaatcttcaagtaagcatgacagttgtaaaacccttgtgaaaagcataagaatagtatctccaatcctcttgattggcttcaaacagctggcatgacctgcccactcattaaagagtagaactggaagagaatttaaatcattaacatctaagtccccgccttctactaagtaggaagactatgtcctccaatgatgataatgttttttctaatcaaaaatcagcttccttgcattctaatataaaggtaatacatacttacagaaaaatcaaccaaaacagacaggtataaagaagaaagtactacttaattactattaatattttgttgaacatccttatagatgctgttctatgcaaatccttatgcatataaatattgcactcatactgtcaccaacaacggacccatttctctatgtctgattatactgggtgtgcgtaatctttccaaactttaccaatctttaccatcagacaaaaagtaagactcaaatttttctgagtgatttggttctagtgctgaggatgagcatcttgccatgtacttctttctggcttttaatggacagtatgtgcaatatatagtggcctggagaataaataagatggtttgctaccatactcccagatatattgcactaactctgtgtgtccttgagtaagccacttaacctttcaatgcctccatttcttcacatgcaaatgaaggatttggaataggcgttcttgagcttcttctctagctatcagtaggggagtgatggggaatgcaccatgcagatctgcagtaggcatctttgggtgactaactcaatagccattcccagcccctctcccttccctgcttctattctagaagaggctggaaaaacccaacatcccctctgtaggccttttttggagttaagggatgacaatatgaccaaattctggctaaaaagacagagggaagtctatctggatgcttctagaaagccttttgctttcctgatggaagaaacaggcacaagagagagcaagctcaccagcactgtctctcctttgcccctggcttccatgtagacttgatgcctagacccgtgggacagtagctggcttcgtattgtgttggtccagctaagcagcatctgttacgcagaatcctcccatagttccaggttagcattggccacaagggaaatattgcatgagatctgggaggcagcaaccaagcagcagccatggtttttatgctgtgaaggacaacacaaggcgtgaggaacattggcagttctcacgcattgtcgctgacctgctgcctcaccttgctggcatggggcagcaagactcacagttcctcctgctcccaccagatctcctcctatggcttcttcaagtcctaagccaagtgcatctgtagctcggtaaagggtgccagcatgttttgcaggacacctgtattattgaggctggagacagtgagagacacaggcagatccggtctgtcctaaaggacttcagtcattcatgaatttcagtttgttctcacagattccagtctgttcttgctatcatccacatccaactttctgccctgactgaaatcctgactgacctatagtgacttcagactcaacactagaaccgaagacaacaaacagccatgccaggactcctccaccaggtctcacatcctgcaaggtctagggcagcactgtccagtagaactttctgtgatgatggaagtgttttattgggcacctgagctgcccaatatgatacccacaagtcacacgtggctattgagcatttgaaatgtgcccagtgctgtagaggagctaagttgttactcttatttaatgttaattaatttaaatttaaatagccagatgtggctaatggctacaatattggtcaagggaggcctagtgcctaataataaattccatgttttcttaatcactcgtagtggctctgtttctctggttgaatcctgactgatacaggcagcagctgctagctacatggggagagcatggagacacaaagccagcattactaggaatcacagggctagaggaagaagcagcctggctcctggaagttcaaccagcctacaacctttgaacttcttagtaagaaaaaaaatagacccccagtgggcagtgaactatcactgtgtacttccaataaaccctgtctcttttcttggtggcttctgcttcctgccgtgaagtgtagaccttgtctcaaataccacaggacacagatggtgttcttaggactcaatttgaaaaaaaaatgtatttatgcatgcataggaatcataaaatataaatttaaactcgtcttttgaacgaggaaagtaacatcaatagaactatgaacaagaattaatgttagctttttgcccaagcaattctcctttccttcatgtttatctttgctttctcttgaagaatgacctaaaggaagtaacccaccttccacagtcctttgaattcatggatacataaatgaacactatgaactttagactttaagaagtgtatattagtcagggtttgccagagaaacagccagtaggatggatatacataaagatatttattataaagtatcaactcatgcaattgtggaggctgagaagtcccacaatctgtcatgtacaagctggagacccagtaaagctggtgacaaagtttgaaagtctgggagctgaagagccagtggtgtagattccagtcctggtctgaaggcctgaaaaccataagtgtcagcggcaggagatcaatgtccccactcatgcagtgaggcagagagtgaatttcaccttcccctacttttttagtctattcaagccctaatggattgcatgaagcccaccaacactgagaagggcatgtgctttactcagtccatcaactcaaacactaatctcctccagaaacactttcacagacataccccgccatcatgtttaaccagctacctgggcatcccatggcctagtcaagtcgacacataaaattaaccatcacatagtgttccccacatacaatggccccacaaacaggaactaaacaattagcaaagctctatggctcaattctagaattgagggtgttaatctgttttctgttaaggaactctaggctctatgtaaactgaaactgtatcaaaatgctgacactaaaattagaaatgggaagaagtagcttttaaaccacaaaattaactgggggtaactgacaagcaagattagacttgcacttaaaggaacaaacgtgatggtccagttgctacgtagcgacagcaaacttatcaactctcctactcagcaatctagcaacagggaacacagcaaactgctaaaccaaacacacacacacacacacacacacacacacacacacatatgtatgtattctgtccaaatgctggaagcaattaaaaggagtaatttgaacaagcaatgctgagcagcacagtaattaataggatactggcctcccaagatttatagggcccactctagtcttcctcttgtcacataccttaccacaggtgagacaccctcagggcactattcacccagaccccattacccctccattctagaccaccttccaggtacctgagatcatgaaatttcctgctcaaatgttggtcccataactcgcttccagggcttgatcaggcatcttccctaggtccatccaatcaagggtcatttgcatgtttgagatgcatattcccaggaccaaggtggctttggggagagagcttggttatcaacaactatagtgtccacatattgaactatactgtccacatattgaactatactctccacatatttctgtgcaagactccttgtggtgcaagactgagtcaggggttaggaagacaagggggcaggggcctgggggaggatcttcaactgcactcttgctctcgtattcacaaaaaccaggggccggcctgccaccaggtacccatccaaagaaaagctagagacaaatatataggaaaggttaaatagtaggtttttgttgtgaggggccttatgaaaattaaaaaggtataaaaatatttggaaaataagcactgtgcaaattcagtgaatctaaaatcccttatttaatagtaaaactgcagtgcagaattatgctataaatcatagtgttttcctattaagaaatacttctgatttaagtttgatgtttccccattgcttggggtgagatgggggaatgttggagtaggggaatagtcagagatggatggcaaagattggtaataagttattactgacctgcagagtttacagcttgaaagaaaaactgtaggagttaagatcctctttcctaggaatccatgccatgagaagtttagggattgaagtagtgcctgctgacatgtgaaaaccggcctgtaaactttgcaagcgatccagtaaattatgcttgttctagtgggaacccccccccaactccgcattccaatccccaggccagaatcatcaaagttggcaaaaaatattcatggagagtaagcaggctgtagcaagataggctcttcagcaggcaatctttgcttcctcccacgttatgactgtctttcttgccagttccctaggcagatcagacccttcacttcccagttggcctcccttccccaagtgaatgtgacttcttacagaacacaattacctatgttgtctgccaaactggattttgttttgttttgttttgtgttaaatatcagcccattttcacgactctgcaattatgacaatatgtggtaggaaaccattactgtcagctccagtctgaaactggccacttaccaatacactttgccaggaacaagtctttctggatggatactacgtggttaacaacatgtaaagataaacggctaaacaaaatatcaacattttcttacaaggctcagcttaaggacagaacagtgatgtgcaatggttttcatgttgtatccacaaacacaattctgtacaagaaacactcctctttttttaatggttgcttaaacaagtggttatccgttatgctgttgacataggaaacggtgaaatgctagtaaccgaatcaaagcggcagtgcaacaggccgctcggtggtgcgcattgtgtggtttggttccttggatggacacacttgctttacgcttcatcccaatttttgtcccagcctcttagtgtatcttcctgggaatagtaaaaacaaagcaaaacattctggtcttacttcaagctgcctttgcactgttattcccttgttccgctcatttcacgggattgggttctcctaacttcattgtttggtgagttgctttgctttgctcgttgccccgatcttctgtgtattctgcgcagaccccgcaagtgctcctgcactccctcccagccctctgctggggcttaacgcttcccagccgaggtcagactgccgtgcgcttcgagtaccggaccccgaggaagcgagaaacgccgctcccgccggtcgcgggcagcttcagtacaccggcaacacgcgcgcctctgcccagtgccgcgcccagcgggtgctcagactccttctctccctccccgccggcgcaccccagggactcggaacgcccccgcgagtgtgacgcgtcctgcctcccctgcagctcgcggacactcgcacttgcaaggcctggccagcactcttgggcccgccccccgacagtgcgggggcggagacgacggctcccctaggctctggctcccggccttggccggcgcgggtaggcgcgggagcctcgagcgccgctcggatgcagcagccgagccgccactcggcgcgcggcgggagacccagggcaagccgccgtcggcgcgctgggtgcgggaagggggctctggatttcggtccctcccctttttcctctgagtctcggaacgctccggctctcagaccctcttcctcccaggtaaaggccgggagaggagggcgcatctcttttccaggcaccccaccatgggcaatgcctccaatgactcccagtctgaggactgcgagacgcgacagtggcttcccccaggcgaaagcccagccatcagctccgtcatgttctcggccggggtgctggggaacctcatagcactggcgctgctggcgcgccgctggcggggggacgtggggtgcagcgccggccgcaggagctccctctccttgttccacgtgctggtgaccgagctggtgttcaccgacctgctcgggacctgcctcatcagcccagtggtactggcttcgtacgcgcggaaccagaccctggtggcactggcgcccgagagccgcgcgtgcacctacttcgctttcgccatgaccttcttcagcctggccacgatgctcatgctcttcgccatggccctggagcgctacctctcgatcgggcacccctacttctaccagcgccgcgtctcgcgctccgggggcctggccgtgctgcctgtcatctatgcagtctccctgctcttctgctcgctgccgctgctggactatgggcagtacgtccagtactgccccgggacctggtgcttcatccggcacgggcggaccgcttacctgcagctgtacgccaccctgctgctgcttctcattgtctcggtgctcgcctgcaacttcagtgtcattctcaacctcatccgcatgcaccgccgaagccggagaagccgctgcggaccttccctgggcagtggccggggcggccccggggcccgcaggagaggggaaagggtgtccatggcggaggagacggaccacctcattctcctggctatcatgaccatcaccttcgccgtctgctccttgcctttcacggtaagtcactccctacgtttccacagcccggctctgctcagccttctcatgctctcccctgacgcctccaccctttccaccgccctacaaactttttgcaacttgtaaaaatatgtcctaatttgtaaagatctgtagccttccccactagtttcccctcctctttagcccacttccttatcctggcttatgggcgttgctaggctagagtttcttatacaataatacagaccgtccgaaagggagtcctgggcctcagctaagctagccaatctcctcatcctagccctgggcagtgtccctttctcgctgttgcctatcttggcttagtaattgagaaagaggcagccccttccaccttaggatggctgtcactgttccagcctgacgacctggagctgcagtttgctgccctgtacctctcatccactggtgctggttctccatgcttgccttctgttcctgccagggcaaaatgtagtacccaacccatagcattccagctgccattgaaaatggtcccagatgagaagggtccctgaagcagaagtttagagcatttgttatttgtcctaaaagtccaacaaacatctagtttataggtttcccaatttatatatttgaatgtaactctttgtggccatgaaagtttataaaaccataatgataactagaggaaatacttggaggaacatcttgctaagcatttgtaatatcttgcaaaacacgctcttaatgtcactgtcagaaatacacacaggtgtccttcagcttacagttatgcacttgatgagcacaaagccacaggcaggaatggctggtccctctcaggaagggaagagtggggctacctggggaactgaaggacaagagaccaagtcctggcatcgtgctgccttgatttggggcaactttagcagttatttgatgctaactaactgctaaatgatatgaggctgtgagttcaagtctcctcaagtgtaacgttttagctgagcctggaatatgtccgagaatgtgctggcctcttacgggggctaggaattgggagttgtggcaactccacttcctaatcttcagaagagcaagactgatgctgcagcatcaaagcagttaatagtgacttccacctgccacaatcttggagaaaagagatgggcagtgcctactattaacaggtctgacctgtaaaagctggaggagaagtaactttatcctatctcctgcctccattactgcttcttacatcttcatgtgctcatcctcagggatgggaagggacacagggtcccaaaggtctgaatatgattctctcctccccagcccagttaactcccttagctacgttctcttctccctggtccccactgtcctcacccttctaccccatcctctgtcagggcagaaactgttctgaattggttacactttgagggaatgagatagaatattcaaagacgccctcttataaaatgaagtcggactgtgggaggctgcatctcccataccactctgagcaggggagtttatgcaacagaaacgctgtgatgtagaaacccacatggcttatatgcttttgatttattttactggtaggagcttttgattatgttaggagctaaatcagcttttgaaggtcagcactaggatgcagaacatatatctatgaaagaaagcatttcaagttccaccaaacagctttgcattcagcttggggatcagaaactattcctgaaagactgtcttagggtgttgggaattaagataatcagttcttagggttttatctgtcatttgtgagtatatttataaaaatatcccccactatcagctacttaaatagcctgggaatgggtttggggtgataacacacttgtgaaacgatttttagtctctttcctacacgagcaagaggaaaaagttctcctctttgatcatgactgacccattgcataaactgtattttttttaaataaaggtagtggtttccaacaggttgccctgttttcatgtaaattggccttttaccatgagaattccatcgttgccttatgtttttgtaaattcaaatatatgtgtgtggatatagatatagatattgttttccctccctcagttaatattaggccaagggctgctccagagttgccagatagaaggggcttagccacagaaatctggctaaaaggtgttgagggagtaggagctttgctttgaagctgtgtttttatttcaatttcctgtttatggcttgggggggccagatggagactatgaaggggctttagctcccccaaaccacctctaagcattgacactatcagcaaactgcttttgcttctggcaaagattcccaaagagccggagaaaatcctagtgtgaacataatcagaaagccagcctccctgacttccattgttggagctaccatgacaccatattcagatgaactatacacaaaatggaaattggaagcattgtcacctcttaataagaaaatttatattgaccactgatggattttattttgtcaatagattattgggaataattgctagtatctttcacttacatagcactttaagctttatgaaatgctgtactatcttgatttaagttatttcttgaagggcttatctgaaaattcaagctcatggctactgtttggttcatacattctgctgttcagaatccttggcatgtgcctccaggggaggttgctttttcctccaagtccttttattctacttggcccacactaaaattgtggtcagaagtggcctataccaatctcccacctgaagcaggaatcatttccacatgtcctaacagggggctctagaagcaaaggtttatggttgccttcagaaatgtttctgtttctctaacggagtgcacatgatctgatagaaatacagtgtgaaccacaaatgcaagccacaaacggaattttaaatgttctagtagtcatataacaaaaagtaaaaagaaacagagaaaattaattgaattacatattttatttaacccaatatatctaaaatattatcaattcaaaatattagttatgtaaaataattattaataagctattccaagtaagtttcttccttgtatcccagaaaatagtagcaatctactctatctcttcccactccttcctcaggataacaagctgctttctttgtccctcaaaagtggaccaaaccactggcaacaaggaggacagctgtacccagtgggacaccagtctattccacagcactccagtagtggacagaggagggaaatgggggaattcagaaacctagaactactaatgtcaggcattgtcccaaggtttgggcaggttggaattactgcttcctccaaagatgccagtctagggcttccaaaattttggaagtaaaactgtagttttttttaaaggcccagtcccttcaagtgaagtccaattcaacctcatatgtcattattatcgaccacaaaatcagacttttgaatgctaacttttgcattaacccattatcttcacagcaccgtaggaaatagtatgatgatttctatcgtacagacgaggcaaatgactcaccctgtgtcccacagctaatgggtggtggaactgggactcaaagctaggcaatttaagcactgagccaattaacctaaccacaacactatccaagagaaagtactcatttcaggggtaacagatgagaagattaatctaagatttcataaaagagctgtgagaatgttataaatatctggaccactttgcctcttaattccaactagttagctttaaaaataaaatggcaaagacctttttcttcatgtcagctcaagggagctgagccagggccaactatgtggttccctttcttttctccacagacctatgaaataaaaggctgagactcagattctaggagattggctaatgtaaatgctggtctaaattaagaaataatcagattatccctcacataaaatctttcatcagaacaaataaaacatctcttaagtgaccaaaaaccatgtggtgtttgggaaatgacattattttggctgcccagtatgaaattctgcatggaaccaacaacatattccaaactgtttattcactaaagggatattgtataaattaataaattcctccttatgttaatcagctttgccatcgttttacagagataaatagaaactttcttcctgaaatggaacagaacacaggaaatatatgagacctctattcttgcctcagatactgtttgtgtcttcatatccaactcatatcaagcccctttctcgccacttttctaattgtggatagcttctggccattttaaactgttttccacatgccatgaggataaagtgcttatgtatttttattcagttctaaaatttcaagagtaaaccattgactcatactaaaaagttctccatctttagaaattctttagggttataacttctaggtaaatctgattagtggaaatctgatcttggcaatacaaaacaaactccagtaaacagtactagagtttccttttcattcctggtactcattatgtaaaatataacatgaatgggggttgaaaagctgatatgacattggtagattatatacatgccaaatataacaattctggtaggaatgaaaaagaactccagacatctctacgtataaccacaatgaactttgcctggtgatagtttaagttaatgtccataaacaactggaaggccctttatcatttaagcatcattaaccatgtgtttggggatcgatgagacagttttaatacacatgatgttttaagagaaagttcctctatatgagtgttttcacttgacgtcttttctcctttgccatttgatattatgaatgctgatttgaataaagacacaattacactggttttaaaaatgtaaacagaaagaaccttagttcttttcccaaaagagaatttgtgcattatgtccacacctttggtcaagtgggtcctcactgctatctcagatggtttagaccaggtcctcagcttaaagagaaacaccttctggagatggtatatttcttctttggcatatcaaaaaccaatcacagtattaagtttaaaaaaagaatagaaatggtgagaccgtgtttcaggaaggcaatgaacaggtctctttccagctagaggcttaagacccagttcatctgcaactcagtctgctcagttggcttctcctgtcctgttttgaaatttctgaccctctactccctgtccttatcttgagctcaagtccattgtacctcagtttatattatcaaggtgtaccaagctccatttttctgagaatattttgctgcctaaaactgcccctaacagaaaactaaacctaagaaccttgcagctgggacatacatgtgatggaaagggccagggatcggataagcacatttagaaaggctgaaagttcctctagagcagggtccataacctgtgctgcatggaaagtgcctggattttctgcctgaattcatttgcaaaaacgtttatatgagtttatgtttatatgtttgtatgagttgtgggtagatggttcatagtgtccatcagtttgtcaaagagttaagagccaccatcttggaataaataggcccagaggtctaaaccttagcatttgctctttttttgtttccagttctgagaagcacaagacaaaggacactagtcctggagccacatggatccagtttttcctattgcaggaaaataggcttctgtttccctctaccacaaagcacctgtgattcaggcaaagggatttctttaaagcatcatatacctgaaaaataatctccccccaaaatgttttttttttaaagaatgaattaggcaaagtctatagtcaggacaccttagtgtctttgagaaggcaggtaaacatataacaatctatgcttgcaatttagctgtggaaaagtgtggaggaaaaacaagtcccagagaaagctaagtagctacttagaaatagccatggtttttcagtccataaacaggaaccatgatatccataaacttttgaagagaaatctttgaagagaaatctcctccaaacccataatgtggtcagacatttgtgaatttcatgctaagctttacattacaggctttttatatagatggcagcagagtgtctagtggctaaaagccaagtttggtgtcccatggattcagtttgactccacattttctctacttacccagactgtaattctatgcaaagtaactgatcttctaaaccttcatttccttctaacataggaataataatacttcgtaggtttatgtaaatattaaacacaatatgccttataaattgcttggcaccatgcctaacacacagtaggtgtttaataaatgttagctgctatctctaggggattccatttcaagggaaaatcagattgtatattaatggtcaggaaatgaattctgaaagctcaaagtcatttgtttgattgacctaagtgggccttttgtttttaagtgtgataaatgaataattttaaactattccaggttttagataaggttctaaagggatgtctcacaccctggctgcatattaaaattacttggagcactttacaaaccttgatgcccatggctcagcctagactaattaagttggagtctctgggtatcgggggaactcacccccaatatttcaacttaggttctttctattttccataagtgttggccggctgagaaagagaaagagtacgaagagaggaattatacagctgggccgctgggggtgacatcacatatctgtaggaccatgatgcccacctgagctgcaaaatcagcacgtttttattaaggatttcaaaaggggagggggtgtaagcagggagtaggtcacaaagatcacatgcttcaaagaggaaaaaggagaacaaagatcacatgcttctgaggaaacaggacaagggcaaaatcagaaactcctgataagagtccaacagagatcacaaggcaaagggcaaaagcaaagatcacaaggcaaagggcaaaagcagaattactgataagggtctatgttcagtggtgcacgtattgtcttgataaacatcttaaacaacagaaaacagggttcgagagcagagaaccagtctgacctcaaattaaccagggtgggtttttttccccaccctagtaagcctgagggtactgcaggagaccagggcgtatttcagtccttatctcaaccgcataagacagacactcccagagcggccgtttatagacctccccccaggaatgcattccttctccagggtattaattattaatattctttgctaggaaaagaatttaacaatatcttccctacatgcatgtcagtttataggctctctgcaagaagaaaaatatggctctattttgcccgaccccacagccagtcagaccttgtggttttcttcccttgttccctgaaaatcgctgttattctgttctttttcaaggtgcactgatttcatattgttcaaacacatatgttttacaatcaatttgtacagttaacacaaatatcatagtggtcctgaggtgacgtacatcctcagcttatgaagataacaggattaagagattaaagtaagacaggcgtaagaaattatatgagtattatttgggaacggataaatgtccatgaaatcttcacaatttatattcctctgccgcggctccagccagtccttccatttggggtccctgacttcctgcaacatctggggaagggagaaatgcctcagaatatttttatgcatgtatgtatgtatgtatgtgtgtatgtatgtatgtatttattttgagacagagactcactctgtcaacccaggctgaaatgcagtggtgtgatctcagcttactacaacctctgcctcctaggttcaagcaatccttcccctcagccttccaagtagctgggattacaggtgcccaccaacacgcctgggtaatttttgtattttttagtagagatgtagtttcaccatgttggccaggctggtctcaaacttctcacctcaggtgacctgcctgcctcggcctcccaaagtgctaggattacaggcgtgagccaccgcacccaacctatttttaaagctcctcaggtgatttcaatgatcggccaaataaagccctcatttgctctaaaattctgaacccactttgtaattgcattaaagatagaaaagtagcgcaaaagaatagtacctggtcagtgccaaaatgaagttttctatgggaggctgcttctatacatgacaatgctaaaatagcactaattctcatctgtgccactttgtaaatgtcacaacaaggctttaccttcttaacaaagccctgtagagacagcctgccctgaggaattaaaattcacttgactcattgggattagcacttggtatttttctcataacaaatacattggtagtgcacacaaaaagatggataacttctaccaacctctgaaactgaattgccgaatatcactgacatattattaattaattatcttatatcctttgtgacatcctttaactaaaaactcaggactggccggagggagaggagaatgggcagttattgtttaatgggtacagagtttcaatttgggatgatgaaaataattctggagatggtagtgatggttgctgttctttgttcttttacgtggatgcagtcaagtgcatccacaagaagagacacaggagatgttcaggaaaacacagacatggtggaccactcagggccacatgaaaaagcatcggtttcagtcaggaggcagagaggcaggagggtggggaggacctgggccaagcctttattggagtttccacaagaaaggcagagcagggtaaacagtttaggattggttaggttgaataatttcagcaggcgctaagctataggggtggtccctagttgcctggtacctggcattggaatgataaaagcagaggaataaatatttccttgatagaagagttctggccctggataggttagtctgtatatcaaagacatgctcccagcctaactctttgctatctctacaaattagctagccccggaggggcattctctcccagccaagaagaatttaagatgtcaaaacataatatgcagaaaagtgaaaatataaacaatatgattgccccacaatgtaaatgtatttaatgtatagctgaaaatggcaaaatggtaaattttatgttatatttattttaccacaattttttaaaatcccagtatccataagatcaaaaatatagtaatctaggcaaaagacaagaaccaaaagaaaaaaatggggaggtagaagacaaaacttacatcaagaatttcgagggtcactgaagtatgtctcttctccaagtataaaagaaggaactggctgggcgcagtggctcacacctgtaatcccagcacttcgggaggccaaggcaggcagatcacttgaggtcaggagttcaagaccagcctgtccaacatggtgaaaccccatctctactaaaaatacaaaaattagccaggcgtggtggcgggtgcctgtaatcccagctactcaggaggctgcagcaggagaatcacttgaacgcaggaggcagaggttgcagtgagtggagatcacgccactgcactctatcctgggcgacagagtgagactccatctcaaaaaaaaagccgtcttctacaaaatattggtcacctccaaagtgcaaattttaagcaattctcaaaattacccagcatagtagatgaaaaggaaaggaaacagtacagaattgcttcatcctctacaccaattttcacttctcattattctgtcacgctctaaagacattcaggaactctgatgtgggttattctcccctgaaaacctgactcatcttaatgtgtgaagctgcaacaccagaggctatgccttttctgcacttcttggctggccaattcagtgtgaatatgttctctggttaaactagatcatcaactcagctgcaggccctttctacaggagtgctcagttatgcatcatgtgcacacgtgtgtgtgcatatgtaatcactaatatgtgttttaatctgtagacctatgtgcatcattatcctgaatttcttacctccaaatcactcttttaacacaccagcctgtgtagttttcatccaaaatagtttaactgacaagaaagctattgctccattgcacctcctcacctagctttcctctactctctgggaaacccaccatcaattcttctttttccttactcatctgccaaatcttttctccattccctatgccaagattctccggcgtaaacacctatggctgccaaaccttcctgctcttgtcccaacataagcaaactgaagatgactaccctttgcgctctctgcaatttgctttgtatatccagttgccagatgcctgcagagtaagtactcagagaagggaaacaagctgctccttcttctgcagaaggcgagtgaagaaaagaggggctaggtgtctaaagccattggtaagaaagaccctggagccttataaagcactggttttaaatgactaggtgtgatctacctttgttttcctcttttctgtgaattttgtagaagtgtgatctttatcaagatgcattattccattccttccaacctgcccaaacatttatgttgctccctaaataactaagaaatcgtttgagggctggtagagcagtttggtccatatgtaaagatgtgtcagctttccagtgttcaggacattgttctgaggcctttgctctaatacaggcctgcacgtagcacacagtgagcactgcactggcatcaggagagttggaatttgcatcctgatttggccactaaccagctctgggtacttgagcaaattatctaattttctataccccagtgtctgcatttgtaaaatggatataataacaatgaacactgtggagcacttaggatgtgagcactgatctaagtagcttacacatatcacttcctatcatcctttcagcaactctatgaagtgggtatgttattattatcacccattttaaagatgtcaaaactgaggcacaaaggtccattattaatatcttgccattggtctcaaactatatacagaggtaggattcaaacccagtccaatggccagaactcatactcccactcagggtgttccattgcagaacctgtctcgctgaattgtgatcattagatttagtatttggaagtaaatgtaacatgttattagttttcctgaagttcacttccttatctgttaaaaagagacaatctctaagtttcagagtttctataaggagtagagataaagcggggttagtacccagaacaattcatgacacatatattaggttattgatacactggagctactaatattatcattattatttatattgttaaaagattctattctagatgacaagaaaagtttatttctctccactcccaatgacaccaagacattgtgcatggtgttaatgttaattgcattccacagaaaacatgctttcattgagttcaaggggaaaaaatacattcattatgttacagtttacataaggaagaaaggtaagattcccaacccccacctttcgttccccaccactaccacagacaaaacatggttttgcttttaaatctcaagacataacatagggtctaagcctgtctactgctacgatgtaaaactaacatcatttttcccctttgcttcttacagatttttgcatatatgaatgaaacctcttcccgaaaggaaaaatgggacctccaagctcttaggtttttatcaattaattcaataattgacccttgggtctttgccatccttaggcctcctgttctgagactaatgcgttcagtcctctgttgtcggatttcattaagaacacaagatgcaacacaaacttcctgttctacacagtcagatgccagtaaacaggctgacctttgaggtcagtagtttaaaagttcttagttatatagcatctggaagatcattttgaaattgttccctggagaaatgaaaacagtgtgtaaacaaaatgaagctgccctaataaaaaggagtatacaaacatttaagctgtggtcaaggctacagatgtgctgacaaggcacttcatgtaaagtgtcagaaggagctacaaaacctaccctcaatgagcatggtacttggcctttggaggaacaatcggctgcattgaagatccagctgcctattgatttaagctttcctgttgaatgacaaagtatgtggttttgtaatttgtttgaaaccccaaacagtgactgtactttctattttaatcttgctactaccgttatacacatatagtgtacagccagaccagattaaacttcatatgtaatctctaggaagtcaatatgtggaagcaaccaagcctgctgtcttgtgatcacttagcgaaccctttatttgaacaatgaagttgaaaatcataggcaccttttactgtgatgtttgtgtatgtgggagtactctcatcactacagtattactcttacaagagtggactcagtgggttaacatcagttttgtttactcatcctccaggaactgcaggtcaagttgtcaggttatttattttataatgtccatatgctaatagtgatcaagaagactttaggaatggttctctcaacaagaaataatagaaatgtctcaaggcagttaattctcattaatactctttatttatcctatttctgggggaggatgtacgtggccatgtatgaagccaaatattaggcttaaaaactgaaaaatctggttcattcttcagatatactggaacccttttaaagttgatattggggccatgagtaaaatagattttataagatgactgtgttgtaccaaaattcatctgtctatattttatttagggaacatggtttgactcatcttatatgggaaaccatgtagcagtgagtcatatcttaatatatttctaaatgtttggcatgtaaatgtaaactcagcatcaaaatatttcagtgaatttgcactgtttaatcatagttactgtgtaaactcatctgaaatgttacaaaaataaactataaaacaaaaatttgaaaatggagtagtattttatgaactccctcaaataacattttgtgattaatataaacatagtatcttttaaatgagttcaaagtggaaaaattatatttaatttggcagattcgtaaagtgtggttgccaggttttaaagtgaggttgcaaattagagtttaaaatattcattataatacttggtattagaagatatttttttcctccagtttttacccttccagtatgatctttaaaatagtagaaccatcttatttttttcatagtgatattattggatagccactccttaaaaaaaaaaaaaagagatgcttgttttctccaaagtctcattgagttgtttatccaaagctatttcctttaagcagttatcaaactagctgatcacttagaatgatttcaaaccaatctaggcatcagtgtattttgatacaaacaatctacgtcaaatcagctcttaagaagaataaataagtggtttgcttttctacaaatttaaacaagccaggcaaaatttaacttaactaaaatctagacatgtaaataaatcttccctgtccaccaggcattctaaagttaagaaattattctaaatgggactaattaggcccatgggtaattcctaaacataaaattctgaagttgctttgaactagaagattaattacttttatcagatgacttgtttttctccagatgaaaatgtcaactacaatttttcaccccaccttaccgcccccctaaaatcccagaataatgcctgagaactgaaaacaaaaacacaaaattggacataatatcactagcaggaacaaaatgatttgctctggagcccaaagtataagaatttaagccacttatttaagcactggtatatttctagaactctgtttcctcatgtactcctgttccatgtactgtgctgaatgactaaatcctggtatttcatttataccaatatatatgtagaaggagttgaaagtaaaaatactctgtaatagtcattacctcctattaatggcaatttaaaggtagcttagaaaaaaattactaaaattagatatgtaaatattccctttctaaaaatcctgtcacatcagacatacctgtttaagttactgtttcatcatcaagttaaataaaagaacagaatttacttagcctgatatattaaagactgaattgtgataaaagaagatctagactttattctttgcccctagtagtcagaatgaaaagggagaaagaaaccatagtcgggattccctgcagcatgccagccctaagtttaggtgtttcgatatgagatggaccaagctctctgctctgagctgaattgttcctaaatggttcagtgtggccctggtcatcttttccaagaaagaactgaaaaattctggtgctaaattgtggccttgaatctccaaaaatctgatcgggatctgagtttgtttagaaggtataagatgactctagaagacctgcatcacaaagtgggttggacccatgacaacccagagcaagactgaaactctagaaaccactccaactccaaatcatgatgcttgcagaggtctcgaaccctgaggagggagggcaaaactgattcacatcactacacgctcatgtaactcagttacactttggcatctctgtctcctcagcatcagtgcactttgagagagggattgtcctaatgctaatggcaggtcagctctgatctgaaccaagaaataacaacacattccactttagaatttgatgactttgaaaggcaaggggagacaattagctctcacttaggcagagttttgtttatttcacttagcttaagccaaatctaatggtttttggaacttgggaagagccactacttgagacagttatagagagagatgcattcctctctataaatgagtatttcattcatgtcgacttgcaatgcctgctcttacttgctctgttacaacctgaatatttgatgcctctcttctgccttcatcaaacactcactccactggctttcctctcaatcacctaacagcactataattgatttttaaatttacaagtcgttttgatgacctaaaatacacactatggaaagaagtattattttagcaattcacaaaagctacattttaatttatacatgggccaaggccatgtattaggcattacttatttcagaaaattactttttttttcctggcagcttttgtgttactatacaaaaagaaattaagtatattctcttgaatgatatatttttatttcttatgaaatgtatgtattatttaaggtcaattttagtggtttaattctgtgatccatgtatttcacggcacatgataaatcctaataaggttagggattagtatcatcttagatacccatttagtggcccctctgacctctttacacacatctggctcttatttctgattctcaatggcggtggtgggtgctaggggtgatgctctatattaattaactctgagtaactgtcaagaaaaatgataatacacaaatgggacaaatttgcgtttcatagaatgcaatgaagattggtacacatgggagaatgtagaggaatgagtaagtataaaagagagaggaggccgggcgcggtggctcacgcctgtaatcccagcactttgggaggccgaggcgggtggatcacgaggccaggagatcaagaccatcctggctaacacagtgaaaccccgtctctactaaaaatacaaaaaattagccgggtgtggtggtgggcgcctgtagtcccagctactcgggaggctgaggaaggagaatggcgtgaacctgggaggcggagcttgcggtgagccgagatcacgccactgcactccagcctgggtgacagagcgagactccgtctcaggaaaaaaaaaaaaaaaaaggaacaagagagacagaaagacaacaggacatatgacacctcaccattttggtgccctcctccagatcttatccaagttatcagtgcccatctaaaaacagtgggccagaaccaaacaccagtaattctaaaccagtcttaccaatactgaatgctgataggtcagttcctggcttaatctggatattatgtttctattaatgcaacctgggattacaaagctatctagaaaccaggtcctgtctttaaaacctccaacagatggaagaagcaacagcattccagtttacatagaggaaaactgggtgtgcaggggtgaagtgagttggtcactagggacatcctcataagatacccttatgattatggtgctgatcttgccgccctgaaaccacacagccatcatttctctcttgtctcttatctcttgcttttggattggctgtgtacactagggatagggagctttgggcttgtcagttgaacctggtcttttgggttaataattttgcccctgagattatgtgcaactagatgccagtgccctaccccagagaacagttctcttgaagtggaactcactgcttttagttatcaaacaacatttttactagagttaattggcaatactcatctcagtcctaagagtgtgcctgatagatcatgataaataaaatgtttaacaattcaacagcagcacaagcaaacctttgaatacatagtggagactttttcagctcttacagagcttctcagtgtgtccacattgtgaagtgttcagagaacaagccaaaaagccctagagttttgaaaacccaatgttaactttttatgtttttaaaaataaatgtcctcatgttccccgcaggatgaaaggtatgataaccaaaacactgtgggctgcatgttgtggtgtactactctctgacctgtaaaaataaatttttctggtgtgagtaggcgttccgataaaagaagagcaagcctaattgtaaactagagactttattctcttgactacctattatggtgatgagggagctggacacccactccaagaggaaacactttcagatgttcacatctttccatgacatgccagtctggaaaactaaggaaggtgaagagtcagattcctgtcttctacaaatttcttctgtgtgtgttttttgtgtttgtttgttttgttttgttttttgagccacagtctcgctctgtcgcccaggctggagtgcagtggcccgatctcagctcactgcaagctctgcctcccgggttcacgccattctcctgcctcagcctcccgagtagctgggactacaggcacccgccgccacactcggctaattttttgctttttagtagagacggggtttcaccgtgttagccaggatggtctcaatctcctgacctcgtgatccacctgcctcggcctcccaaagtgctgagattacaggcgtgagccaccgcgcctggcctcttctgtgttttcaatgaagttatagtgaactacaatggctgcaaagaaatattaagtggggaaacaaaatcatcctgttatcagtgttaaaggctttttcaaataataaggactttcctttatttctctatttgagcacattaaaatgctactaactggaatccttcatagcaggaattttggattaagagacaaatcacatggggaaaaaagcctgataactttatttttaaactaaccactgaaaggttaagtgagaatcgtgacactgggattggaatgcagacgtctaatcagggagatcttccatctaggtgaactttccattacccaggcctcctgtctctccccctgctcatcgactccaaccacaccggccaccgtgctgggccaggagtacacccagcaagctcccatctcagggtcattgccctggctgttatctctgcctgcaacaaatgctcttcctccaggcagccctggctcacttcctcaccttcttcaacattttgccccagagatgcctcctcagtaaggccattactgaaccctcttcctaaaactacacgcccctgccctccccattccctttgccctcctctatctatgagtgaccttaaacatacctcaagattgacttatatataatactcatggtctgtcgcccccgagtagaatgtgagtcccaaggacagagattgctgcctgttttgatatctaatgttatggtatctcacacttgccaagtgtcctatacacgtagaactatatcttatacatttcaaggcctttttctattttttatttactcagtgtgttaacagtagtgagggcatatgggtcgcagcaactcgatttttgcctcaggaggaaagaattcggctgaggggcataaggcagagggagagactgaggcagttttagagcaggagtgaaagtttattaaaaagttataaagcaggaacaaaaggaagtcaagcacacttggaagagggccaaatgggtgacttgagagatccaagcatgctgttcggcccttgacttggggttttatacattgacatagttccagggtttctgtttctcctcccttgatttttcccttggggcaggctgtctgcttgcacagtggcctgccacatgcaaggtgggccacatgcaaggtggttactgaagttgtgcgcatgctcatctgaggcacttttcccttatcagtcatgtgttccaaaaagagggtcatataccagttaaactctgccattttgcctcttagtgcacatgcttaagcctgctcacccagctcccaagatcttattgggaaggtgctgatcatcactttcaggtgttttctatctattgagacacagcctttccctggcaccagctgcaaccaattattattttaaagagacagtttaacaaccagctgactaccacctaatggctgcctgacattcctggggtcggggactctcctgtccagctcatgtctgcctagctacctactctaacaagtatattcttcgaaagatattttgaaaatgatcccataccatgttttgaatgtggtaaatctcatttagtcttcaaaacaacactgtaaggtaggcactgtccccattctacagatgacaaaacgtattcaaaattaagcaaatagctcaagatcacacagcttttaagggaaagttaaaaaattaaactattttctggccaggcacagtggctcatgcctgtaatcccagcactttgggaggctgaggtgggaagattgcgagatcaggagattaagaccatcctggctaacatggtgaaaccctgtctcaactaaaaatacaaaaaattagctgggcctggtggcacacgcctgtgatcccagctactcatgaggctgaggcagtagaatcacttgaacccgggaggtggaggttgcagtgagctgagatcgtgccactgtactccagcctgggcaacagagtgagactccatctcaaacaaacaaacaaacaaaacaacaaaaaagaacaattaaactgttttctgatttcaagccagggatcattctactgaccctacataatggagatctataatggccctctatttccgactctattcccccggaaggaaaaccccattggcatggccctggcctatcaccaccatatttgcagtatctaggatcatgtctgatatgtagtaggtgttcataaatatttgttgaatgaacgaatggctagtgtcaaggatacaatctctgtcagtctctgaaagacttcatcttcctcctgttttcttcccctcctctctgaacaactcaatgtgaagccctttgggtggggcagactaaggcaggcttctgcagctgggggtgtgagagcccacgcaggggcctggagcggattgttcaagctcaggttgggcgaggatgggggtgctgctgtgcagagtatggagccctagtggactggggagagtgttcacacagaaaggcagcctacagtgggcatcagagtccaaagcagataagaaggttattcacacagggggtgtgacatggtgtggggcactggaacccaaacagggagggagtgggtgccctggtattgggttgtggggcctgaacagattgaagcagaggagggtgtccattcacaggagcagccttgcatggacaatcagagcccaggggcctggggaggctgtccacatggggtgaactgctctagggaggcagagcctgactgagaggatggggcatccttgcaaggggatggcccagtgatggggtttaggaacctgagcagggtgagatgggcatgcacttgtgggatggcctagcatgagctgtcaggacccaagcagggtgagcatggcctccacgtggggtgagctggggactcagattggggactgacagcttgagcaggaagagggaggtgtagggagaggaagatgttggagatgggagattggctacatacagaaggatttatcaaataaacaaatatattaaaaataacaaaaaacagtttagtcactgttacagaaaaatgaaggggaaaaaactggaatggatgctgtggtgttggattggaattgggatattgtgttagctcatatttttcaatatatagagataaatatggaaataaattcatatgtaaatgtgtgtgagtgtgtgtgtgtgtgtgtgtgtgtgtgtgtgtgtgtgtatcctctagctctctccactgagaatagctgggattagcaacctcttccccatccaatagcaatgagcacacctagctcataggtcttgttttctaaataccattttcccctgaaaggaaccagggctcctctgagaaatggctgacttcaaaactggggcagggaaagtataaagcaagcctggaacatcttaattataaggaagtgcttgaggaatgagagagccacctcacaagaacacagaagccggtttgaaaggggattcccactgaccaaactggggacaatttgagcatcaacatatataatgataataatagattatgatcccttgaaaaaaataggaaacagtgattccacacagataaaaacaaatttaaaaatgaaagtttaatgagaaacaagcgacttacaaagtttcaaagtacctgaccataaaataaccaaagggaaagaatcactttacagtaagaaatcctgacagaccctaatgtaatcgggagaccaaagtaaactatcatcagtgacagaaccaattaaattctaagccagaagacaaactgcactaagaatacagtgtcacttctgggatatttcttcttatcgaagaagtacctgaaagaagtagcctaaccctaatcatggagaaataccagacaaacccaaattgaaggatttctacaaaatgactggtttgtaatcttcagaagagtcaaagtcatgaaagtcaagacagtctgaactattccagactgaagaaaactaatgggacaggacaatcaactgcaacaggggaatcagaactagattctgttgctataaagagcattattgcgacaactggcaacacttaataggtcttgaggaatagatgttagtaatgcatcagtgtaaactacccgattgtggttattaaattgtggttctataggaaaatgtccttggaaacacacaatgaggtactgaggaatgatgatgcaccatgtccacaacctaatctcaaataattcagggggaaaaagttatgtgtactgtgctcctaatgtttctgtgagtttatgattgttttgatactcaaaacaattaaaaaataaaacagtaggcatactcccttcaaaagaaagcaaaccaaaaaaggtccatactgtttgcacataaagatacattaacaatgtaaactaaaatcaatctaatttctatcactctaatttttcctcatatattttgtttttgagttgtgaatgaagatgcatatatgaaacgaatatcaaaactaaatgccagtgatagctatcttactggttggagaattaggtggtccacaaaactgctatctatctatctatctatctatctatctatctatctatctagagacaaagtctcactctgttgcccaggctggagtgcagtggtgcaatctcggctcactgcaacctccgcctcctgggttcaagtgattctcttgcctcagcttcccgagtagctgggactacaggtgcgcaccaccacgcccagctaatttttgtatttttagtagagacggggtttcacagtgttggccaggatggtctcaatctcttgacctcttgatctgcccacctcagcctcccaaagtgctgggattacaatcatgagccactgtgcccagccaaagctgctctttataagagtggttgtcttaccaacttgtttaccaacaagtcaggctaagcatttatatgacatgaaaggaatttatatatttatcactctgttcccattagagagaaataaaccaaatacattgacaactgtgaactgttatttaaatttacatgacttattttggaaaaataatgcagttatttcagcattaagttaatgataattttagctattatatgaaaaaatgattctgtgcaaaagaaaacagtagtctacccactagaggtctagcccacattgtgattatttgaatttgtgggcttttgcagcttcctcagaataatgagttcattcttaactacagaatagctgcacttcaaccttcttgttactcacttcaacctgcacagatgcaacaaggttttgaatctcacaaatggagatttattattcttaaagatgaatttccataagtcctttcgcataatgaaatttccatttaactttccatgcatttccataagagcaataaggaaatctgtttgctcacttctcctgtcaatcataaatctatgctcaaaagcatggaaggattgtgtttactctgcagactgtgcaccaggatacccaggggagggagcagattgtcaggaaattagtcacaagtactgcctcatctacttagtactaatctcctccccagcccatcctccaccctggtgtaggggtattgtccttggaaacagaatagcacagtgcttggtataaaatttgaactttgaagttggacagacctcatttcaaatcctaactctgccactgttgtgtaaccttgaataagttacttagactttctaagcctgttttttcaccttcatcatgagggtagtagctgcccacctcataggatttcggcaaaaagtcagatgataaaatcataccaaaaaaatcacatgaggcatatgaaatacttaaaacaatgtctggtacatggtatgatctttaaaaatgccggttattattatcattattgatattttaaaatgagaatctgatcatgtttttaggatcccatacttatagtgtactgatttccaatcctctgctacccaaacctttctcatcatgtgggacctacacacacacataccaccacccaccaacaacactaccaatactaacaacagcaccaccaacaacacaaccaatataacagcactaccaatactaacaacagtaccactaacaccaacaacactaccaatactaacaacagcaccaacaacaacac

SEQ ID NO: 1736 - DNA, 3237 bp, Homo sapiens
agtgccgcgcccagcgggtgctcagactccttctctccctccccgccggcgcaccccagggactcggaacgcccccgcgagtgtgacgcgtcctgcctcccctgcagctcgcggacactcgcacttgcaaggcctggccagcactcttgggcccgccccccgacagtgcgggggcggagacgacggctcccctaggctctggctcccggccttggccggcgcgggtaggcgcgggagcctcgagcgccgctcggatgcagcagccgagccgccactcggcgcgcggcgggagacccagggcaagccgccgtcggcgcgctgggtgcgggaagggggctctggatttcggtccctcccctttttcctctgagtctcggaacgctccggctctcagaccctcttcctcccaggtaaaggccgggagaggagggcgcatctcttttccaggcaccccaccatgggcaatgcctccaatgactcccagtctgaggactgcgagacgcgacagtggcttcccccaggcgaaagcccagccatcagctccgtcatgttctcggccggggtgctggggaacctcatagcactggcgctgctggcgcgccgctggcggggggacgtggggtgcagcgccggccgcaggagctccctctccttgttccacgtgctggtgaccgagctggtgttcaccgacctgctcgggacctgcctcatcagcccagtggtactggcttcgtacgcgcggaaccagaccctggtggcactggcgcccgagagccgcgcgtgcacctacttcgctttcgccatgaccttcttcagcctggccacgatgctcatgctcttcgccatggccctggagcgctacctctcgatcgggcacccctacttctaccagcgccgcgtctcgcgctccgggggcctggccgtgctgcctgtcatctatgcagtctccctgctcttctgctcgctgccgctgctggactatgggcagtacgtccagtactgccccgggacctggtgcttcatccggcacgggcggaccgcttacctgcagctgtacgccaccctgctgctgcttctcattgtctcggtgctcgcctgcaacttcagtgtcattctcaacctcatccgcatgcaccgccgaagccggagaagccgctgcggaccttccctgggcagtggccggggcggccccggggcccgcaggagaggggaaagggtgtccatggcggaggagacggaccacctcattctcctggctatcatgaccatcaccttcgccgtctgctccttgcctttcacgatttttgcatatatgaatgaaacctcttcccgaaaggaaaaatgggacctccaagctcttaggtttttatcaattaattcaataattgacccttgggtctttgccatccttaggcctcctgttctgagactaatgcgttcagtcctctgttgtcggatttcattaagaacacaagatgcaacacaaacttcctgttctacacagtcagatgccagtaaacaggctgacctttgaggtcagtagtttaaaagttcttagttatatagcatctggaagatcattttgaaattgttccctggagaaatgaaaacagtgtgtaaacaaaatgaagctgccctaataaaaaggagtatacaaacatttaagctgtggtcaaggctacagatgtgctgacaaggcacttcatgtaaagtgtcagaaggagctacaaaacctaccctcaatgagcatggtacttggcctttggaggaacaatcggctgcattgaagatccagctgcctattgatttaagctttcctgttgaatgacaaagtatgtggttttgtaatttgtttgaaaccccaaacagtgactgtactttctattttaatcttgctactaccgttatacacatatagtgtacagccagaccagattaaacttcatatgtaatctctaggaagtcaatatgtggaagcaaccaagcctgctgtcttgtgatcacttagcgaaccctttatttgaacaatgaagttgaaaatcataggcaccttttactgtgatgtttgtgtatgtgggagtactctcatcactacagtattactcttacaagagtggactcagtgggttaacatcagttttgtttactcatcctccaggaactgcaggtcaagttgtcaggttatttattttataatgtccatatgctaatagtgatcaagaagactttaggaatggttctctcaacaagaaataatagaaatgtctcaaggcagttaattctcattaatactctttatttatcctatttctgggggaggatgtacgtggccatgtatgaagccaaatattaggcttaaaaactgaaaaatctggttcattcttcagatatactggaacccttttaaagttgatattggggccatgagtaaaatagattttataagatgactgtgttgtaccaaaattcatctgtctatattttatttagggaacatggtttgactcatcttatatgggaaaccatgtagcagtgagtcatatcttaatatatttctaaatgtttggcatgtaaatgtaaactcagcatcaaaatatttcagtgaatttgcactgtttaatcatagttactgtgtaaactcatctgaaatgttacaaaaataaactataaaacaaaaatttgaaaatggagtagtattttatgaactccctcaaataacattttgtgattaatataaacatagtatcttttaaatgagttcaaagtggaaaaattatatttaatttggcagattcgtaaagtgtggttgccaggttttaaagtgaggttgcaaattagagtttaaaatattcattataatacttggtattagaagatatttttttcctccagtttttacccttccagtatgatctttaaaatagtagaaccatcttatttttttcatagtgatattattggatagccactccttaaaaaaaaaaaaaagagatgcttgttttctccaaagtctcattgagttgtttatccaaagctatttcctttaagcagttatcaaactagctgatcacttagaatgatttcaaaccaatctaggcatcagtgtattttgatacaaacaatctacgtcaaatcagctcttaagaagaataaataagtggtttgcttttctacaaatttaaacaagccaggcaaaatttaacttaactaaaatctagacatgtaaataaatcttcc

SEQ ID NO: 1737 - protein, 352 aa, Homo sapiens
MGNNDSQSEDCETRQWLPPGESPAISSVMFSAGVLGNLIALLARRWRGDVGCSAGRRSSLSLFHVLVTELVFTDLLGTCLISPVVLASYARNQTLVAPESRACTYFAFAMTFFSLATMLMLFAMALERYLSIGHPYFYQRRVSRSGGLAVLPVIYAVSLLFCSLPLLDYGQYVQYCPGTWCFIRHGRTAYLQLYATLLLLLIVSVLACNFSVILNLIRMHRRSRRSRCGPSLGSGRGGPGARRRGERVSMAEETDHLILLAIMTITFAVCSLPFTIFAYMNETSSRKEKWDLQALRFLSINSIIDPWVFAILRPPVLRLMRSVLCCRISLRTQDATQTSCSTQSDASKQADL

SEQ ID NO: 1738 - DNA, 1779 bp, Homo sapiens
agtgccgcgcccagcgggtgctcagactccttctctccctccccgccggcgcaccccagggactcggaacgcccccgcgagtgtgacgcgtcctgcctcccctgcagctcgcggacactcgcacttgcaaggcctggccagcactcttgggcccgccccccgacagtgcgggggcggagacgacggctcccctaggctctggctcccggccttggccggcgcgggtaggcgcgggagcctcgagcgccgctcggatgcagcagccgagccgccactcggcgcgcggcgggagacccagggcaagccgccgtcggcgcgctgggtgcgggaagggggctctggatttcggtccctcccctttttcctctgagtctcggaacgctccggctctcagaccctcttcctcccaggtaaaggccgggagaggagggcgcatctcttttccaggcaccccaccatgggcaatgcctccaatgactcccagtctgaggactgcgagacgcgacagtggcttcccccaggcgaaagcccagccatcagctccgtcatgttctcggccggggtgctggggaacctcatagcactggcgctgctggcgcgccgctggcggggggacgtggggtgcagcgccggccgcaggagctccctctccttgttccacgtgctggtgaccgagctggtgttcaccgacctgctcgggacctgcctcatcagcccagtggtactggcttcgtacgcgcggaaccagaccctggtggcactggcgcccgagagccgcgcgtgcacctacttcgctttcgccatgaccttcttcagcctggccacgatgctcatgctcttcgccatggccctggagcgctacctctcgatcgggcacccctacttctaccagcgccgcgtctcgcgctccgggggcctggccgtgctgcctgtcatctatgcagtctccctgctcttctgctcgctgccgctgctggactatgggcagtacgtccagtactgccccgggacctggtgcttcatccggcacgggcggaccgcttacctgcagctgtacgccaccctgctgctgcttctcattgtctcggtgctcgcctgcaacttcagtgtcattctcaacctcatccgcatgcaccgccgaagccggagaagccgctgcggaccttccctgggcagtggccggggcggccccggggcccgcaggagaggggaaagggtgtccatggcggaggagacggaccacctcattctcctggctatcatgaccatcaccttcgccgtctgctccttgcctttcacgatttttgcatatatgaatgaaacctcttcccgaaaggaaaaatgggacctccaagctcttaggtttttatcaattaattcaataattgacccttgggtctttgccatccttaggcctcctgttctgagactaatgcgttcagtcctctgttgtcggatttcattaagaacacaagatgcaacacaaacttcctgttctacacagtcagatgccagtaaacaggctgacctttgaggtcagtagtttaaaagttcttagttatatagcatctggaagatcattttgaaattgttccctggagaaatgaaaacagtgtgtaaacaaaatgaagctgccctaataaaaaggagtatacaaacatttaagctgtggtcaaggctacagatgtgctgacaaggcacttcatgtaaagtgtcagaaggagtgcattgaagatccagctgcctattgatttaagctttcctgttgaatgacaaagt

SEQ ID NO: 1739 - protein, 352 aa, Homo sapiens; identical to SEQ ID NO: 1737

SEQ ID NO: 1740 - DNA, 1248 bp, Homo sapiens
tcagtacaccggcaacacgcgcgcctctgcccagtgccgcgcccagcgggtgctcagactccttctctccctccccgccggcgcaccccagggactcggaacgcccccgcgagtgtgacgcgtcctgcctcccctgcagctcgcggacactcgcacttgcaaggcctggccagcactcttgggcccgccccccgacagtgcgggggcggagacgacggctcccctaggctctggctcccggccttggccggcgcgggtaggcgcgggagcctcgagcgccgctcggatgcagcagccgagccgccactcggcgcgcggcgggagacccagggcaagccgccgtcggcgcgctgggtgcgggaagggggctctggatttcggtccctcccctttttcctctgagtctcggaacgctccggctctcagaccctcttcctcccaggtaaaggccgggagaggagggcgcatctcttttccaggcaccccaccatgggcaatgcctccaatgactcccagtctgaggactgcgagacgcgacagtggcttcccccaggcgaaagcccagccatcagctccgtcatgttctcggccggggtgctggggaacctcatagcactggcgctgctggcgcgccgctggcggggggacgtggggtgcagcgccggccgcaggagctccctctccttgttccacgtgctggtgaccgagctggtgttcaccgacctgctcgggacctgcctcatcagcccagtggtactggcttcgtacgcgcggaaccagaccctggtggcactggcgcccgagagccgcgcgtgcacctacttcgctttcgccatgaccttcttcagcctggccacgatgctcatgctcttcgccatggccctggagcgctacctctcgatcgggcacccctacttctaccagcgccgcgtctcgcgctccgggggcctggccgtgctgcctgtcatctatgcagtctccctgctcttctgctcgctgccgctgctggactatgggcagtacgtccagtactgccccgggacctggtgcttcatccggcacgggcggaccgcttacctgcagctgtacgccaccctgctgctgcttctcattgtctcggtgctcgcctgcaacttcagtgtcattctcaacctcatccgcatgcaccgccgaagccggagaagccgctgcggaccttccctgtaaaagctggaggagaagtaactttatcctatctcctgcctccat

SEQ ID NO: 1741 - protein, 232 aa, Homo sapiens
MGNNDSQSEDCETRQWLPPGESPAISSVMFSAGVLGNLIALLARRWRGDVGCSAGRRSSLSLFHVLVTELVFTDLLGTCLISPVVLASYARNQTLVAPESRACTYFAFAMTFFSLATMLMLFAMALERYLSIGHPYFYQRRVSRSGGLAVLPVIYAVSLLFCSLPLLDYGQYVQYCPGTWCFIRHGRTAYLQLYATLLLLLIVSVLACNFSVILNLIRMHRRSRRSRCGPSL
